(19) United States
(12) Patent Application Publication
(10) Pub. No.: US 2015/0257389 A1
(43) Pub. Date: Sep. 17, 2015

(54) COMPOSITIONS AND METHODS TO CONTROL INSECT PESTS

(71) Applicants: Pioneer Hi-Bred International, Inc., Johnston, IA (US); E. I. du Pont de Nemours and Company, Wilmington, DE (US)

(72) Inventors: Xu Hu, Johnston, IA (US); James K. Presnail, Creve Couer, MO (US); Nina Richtman, Johnston, IA (US); Lisa Procyk, Ankeny, IA (US)

(21) Appl. No.: 14/657,795

(22) Filed: Mar. 13, 2015

Related U.S. Application Data
(60) Provisional application No. 61/953,734, filed on Mar. 14, 2014.

(51) Int. Cl. A01N 57/16; C12N 15/82

(52) U.S. Cl. CPC A01N 57/16; C12N 15/8286; C12N 15/8218

(57) ABSTRACT

Methods and compositions are provided which employ a silencing element that, when ingested by a pest, such as a Coleopteran plant pest or a Diabrotica plant pest, decrease the expression of a target sequence in the pest. The present invention provides various target polynucleotides set forth in any one of SEQ ID NOS: disclosed herein, (but not including the forward and reverse primers.) or active variants and fragments thereof, or complements thereof, wherein a decrease in expression of one or more of the sequences in the target pest controls the pest (i.e., has insecticidal activity). Plants, plant parts, bacteria and other host cells comprising the silencing elements or an active variant or fragment thereof of the invention are also provided.

### CROSS-REFERENCE TO RELATED APPLICATIONS

[0001] This application claims the benefit of U.S. Provisional Application No. 61/953,734, filed on Mar. 14, 2014, which is incorporated herein by reference in its entirety.

### FIELD OF THE INVENTION

[0002] The present invention relates generally to methods of molecular biology and gene silencing to control pests.

### REFERENCE TO A SEQUENCE LISTING SUBMITTED AS A TEXT FILE VIA EFS-WEB

[0003] The Sequence Listing submitted Mar. 13, 2015 as a text file named “36446_{—}0007U4_SequenceListing.txt,” created on Mar. 13, 2015, and having a size of 697,307 bytes is hereby incorporated by reference pursuant to 37 C.F.R. §1.52(e)(5).

### BACKGROUND OF THE INVENTION

[0004] Insect pests are a serious problem in agriculture. They destroy millions of acres of staple crops such as corn, soybeans, peas, and cotton. Yearly, these pests cause over $100 billion dollars in crop damage in the U.S. alone. In an ongoing seasonal battle, farmers must apply billions of gallons of synthetic pesticides to combat these pests. Other methods employed in the past delivered insecticidal activity by microorganisms or genes derived from microorganisms expressed in transgenic plants. For example, certain species of microorganisms of the genus Bacillus are known to possess pesticidal activity against a broad range of insect pests including Lepidoptera, Diptera, Coleoptera, Hemiptera, and others. In fact, microbial pesticides, particularly those obtained from Bacillus strains, have played an important role in agriculture as alternatives to chemical pest control. Agricultural scientists have developed crop plants with enhanced insect resistance by genetically engineering crop plants to produce insecticidal proteins from Bacillus. For example, corn and cotton plants genetically engineered to produce Cry toxins (see, e.g., Aronson (2002) Cell Mol. Life Sci. 59(3):417-425; Schnepf et al. (1998) Microbiol. Mol. Biol. Rev. 62(3):775-806) are now widely used in American agriculture and have provided the farmer with an alternative to traditional insect-control methods. However, these Bt insecticidal proteins only protect plants from a relatively narrow range of pests. Moreover, these modes of insecticidal activity provided varying levels of specificity and, in some cases, caused significant environmental consequences. Thus, there is an immediate need for alternative methods to control pests.

### BRIEF SUMMARY OF THE INVENTION

[0005] Methods and compositions are provided which employ a silencing element that, when ingested by a pest, such as Coleopteran plant pest including a Diabrotica plant pest, is capable of decreasing the expression of a target sequence in the pest. In specific embodiments, the decrease in expression of the target sequence controls the pest and thereby the methods and compositions are capable of limiting damage to a plant. The present invention provides various target polynucleotides as set forth in SEQ ID NOS: 1, 4, 5, 8, 9, 12, 13, 16, 17, 20, 21, 24, 25, 28, 29, 32, 33, 36, 37, 40, 41, 44, 45, 48, 49, 52, 53, 54, 55, 56, 57, 60, 61, 64, 65, 68, 69, 72, 73, 76, 77, 80, 81, 84, 85, 88, 89, 92, 93, 96, 97, 100, 101, 104, 105, 108, 109, 112, 113, 116, 117, 120, 121, 124, 125, 128, 129, 132, 133, 136, 137, 140, 141, 144, 145, 148, 149, 152, 153, 156, 157, 160, 161, 164, 165, 168, 169, 172, 173, 176, 177, 180, 181, 184, 185, 188, 189, 192, 193, 196, 197, 200, 201, 204, 205, 208, 209, 212, 213, 216, 217, 220, 221, 224, 225, 228, 229, 232, 233, 236, 237, 240, 241, 244, 245, 248, 249, 252, 253, 256, 257, 260, 261, 264, 265, 268, 269, 272, 273, 276, 277, 280, 281, 284, 285, 288, 289, 292, 293, 296, 297, 300, 301, 304, 305, 308, 309, 312, 313, 316, 317, 320, 321, 324, 325, 328, 329, 332, 333, 336, 337, 340, 341, 344, 345, 348, 349, 352, 353, 356, 357, 360, 361, 364, 365, 368, 369, 372, 373, 376, 377, 380, 381, 384, 385, 388, 389, 392, 393, 396, 397, 400, 401, 404, 405, 408, 409, 412, 413, 416, 417, 420, 421, 424, 425, 428, 429, 432, 433, 436, 437, 440, 441, 444, 445, 448, 449, 452, 453, 456, 457, 460, 461, 464, 465, 468, 469, 472, 473, 476, 477, 480, 481, 484, 485, 488, 489, 492, 493, 496, 497, 500, 501, 504, 505, 508, 509, 512, 513, 516, 517, 520, 521, 524, 525, 528, 529, 532, 533, 536, 537, 540, 541, 544, 545, 548, 549, 552, 553, 556, 557, 560, 561, 562, 563, 564, 565, 566, 567, 568, 569, 570, 571, 572, 573, 574, 575, 576, 577, 578, 579, 580, 581, 582, 583, 584, 585, 586, 587, 588, 589, 590, 591, 592, 593, 594, 595, 596, 597, 598, 599, 600, 601, 602, 603, 604, 605, 606, 607, 608, 609, 610, 611, 612, 613, 614, 615, 616, 617, 618, 619, 620, 621, 622, 623, 624, 625, 626, 627, 628, 629, 630, 631, 632, 633, 634, 635, 636, 637, 638, 639, 640, 641, 642, 643, 644, 645, 646, 647, 648, 649, 650, 651, 652, 653, 654, 655, 656, 657, 658, 659, 660, 661, 662, 663, 664, 665, 666, 667, 668, 669, 670, 671, 672, 673, 674, 675, 676, 677, 678, 679, 680, 681, 682, 683, 684, 685, 686, 687, 688, 689, 690, 691, 692, 693, 694, 695, 696, 697, 700, 701, 702, 703, 706, 707, 708, 709, 712, 713, 714, 715, 718, 719, 720, 721, 724, 725, 726, 727, 728, or active variants or fragments thereof, or complements thereof, wherein a decrease in expression of one or more of the sequences in the target pest controls the pest (i.e., has insecticidal activity). Further provided are silencing elements, which when ingested by the pest, decrease the level of expression of one or more of the target polynucleotides. Plants, plant parts, plant cells, bacteria and other host cells comprising the silencing elements or an active variant or fragment thereof are also provided. Also provided are formulations of sprayable silencing agents for topical applications to pest insects or substrates where pest insects may be found.

[0006] In another embodiment, a method for controlling a pest, such as a Coleopteran plant pest or a Diabrotica plant pest, is provided. The method comprises feeding to a pest a composition comprising a silencing element, wherein the silencing element, when ingested by the pest, reduces the level of a target sequence in the pest and thereby controls the pest. Further provided are methods to protect a plant from a pest. Such methods comprise introducing into the plant or plant part a silencing element of the invention. When the plant expressing the silencing element is ingested by the pest, the level of the target sequence is decreased and the pest is controlled.

### BRIEF DESCRIPTION OF THE DRAWINGS

[0007] FIG. 1A and FIG. 1B are tables, showing respectively Tables 1A and 1B, which identify RNAi active targets in diet assay using dsRNA produced by in vitro transcription (IVT).

[0008] FIG. 2 is a table, Table 2, which shows design and identification of RNAi active fragments.

[0009] FIG. 3 is a table, Table 3 which lists RNAi active targets from target pests, expanded pests and no target insects. Homologous sequences of selected RNAi actives were identified from transcriptome analyses of Western corn rootworm (WCRW, Diabrotica virgifera), Northern corn rootworm (NCRW, Diabrotica barberi), Southern corn rootworm (SCRW, Diabrotica undecimpunctata), Mexican Bean Beetle (MBB, Epilachna varivestis), Colorado potato beetle (CPB, Leptinotarsa decemlineata), insidious flower bug (Orius, Orius insidiosus) and Spotted Lady Beetle (CMAC, Coleomegilla maculate).

[0010] FIG. 4 is a graphic showing a sequence alignment of the amino acid sequences of WCRW Ryanr (SEQ ID NO: 730) and Drosophila Ssk (SEQ ID NO: 731).

[0011] FIG. 5 is a schematic of PAT3 fragments used in the gene and construct optimization experiment.

[0012] FIG. 6 is a schematic showing the transgenic region of a representative disclosed construct, PHP58050 (SEQ ID NO: 729).

[0013] FIG. 7 is a table, Table 4, which shows representative insecticidal activity against corn rootworms for maize plants comprising representative constructs of the present invention. The representative constructs used in the study to transform maize plants were as shown and described in the table.

[0014] FIG. 8 shows representative Corn Rootworm Nodal Injury Score (“CRWNIS”) data for maize with the constructs described in FIG. 7.

### DETAILED DESCRIPTION OF THE INVENTION

[0015] The present inventions now will be described more fully hereinafter with reference to the accompanying drawings, in which some, but not all embodiments of the inventions are shown. Indeed, these inventions may be embodied in many different forms and should not be construed as limited to the embodiments set forth herein; rather, these embodiments are provided so that this disclosure will satisfy applicable legal requirements. Like numbers refer to like elements throughout.

[0016] Many modifications and other embodiments of the inventions set forth herein will come to mind to one skilled in the art to which these inventions pertain having the benefit of the teachings presented in the foregoing descriptions and the associated drawings. Therefore, it is to be understood that the inventions are not to be limited to the specific embodiments disclosed and that modifications and other embodiments are intended to be included within the scope of the appended claims. Although specific terms are employed herein, they are used in a generic and descriptive sense only and not for purposes of limitation.

### I. Overview

[0017] Frequently, RNAi discovery methods rely on evaluation of known classes of sensitive genes (transcription factors, housekeeping genes etc.). In contrast, the target polynucleotides set forth herein were identified based solely on high throughput screens of all singletons and representatives of all gene clusters from a cDNA library of neonate and/or 3^{rd} instar midgut western corn rootworms. This screen allowed for the discovery of many novel sequences, many of which have extremely low or no homology to known sequences. This method provided the advantage of having no built in bias to genes that are frequently highly conserved across taxa. As a result, many novel targets for RNAi as well as known genes not previously shown to be sensitive to RNAi have been identified.

[0018] As such, methods and compositions are provided which employ one or more silencing elements that, when ingested by a pest, such as a Coleopteran plant pest or a Diabrotica plant pest, is capable of decreasing the expression of a target sequence in the pest. In specific embodiments, the decrease in expression of the target sequence controls the pest and thereby the methods and compositions are capable of limiting damage to a plant or plant part. The present invention provides target polynucleotides as set forth in SEQ ID NOS: 1, 4, 5, 8, 9, 12, 13, 16, 17, 20, 21, 24, 25, 28, 29, 32, 33, 36, 37, 40, 41, 44, 45, 48, 49, 52, 53, 54, 55, 56, 57, 60, 61, 64, 65, 68, 69, 72, 73, 76, 77, 80, 81, 84, 85, 88, 89, 92, 93, 96, 97, 100, 101, 104, 105, 108, 109, 112, 113, 116, 117, 120, 121, 124, 125, 128, 129, 132, 133, 136, 137, 140, 141, 144, 145, 148, 149, 152, 153, 156, 157, 160, 161, 164, 165, 168, 169, 172, 173, 176, 177, 180, 181, 184, 185, 188, 189, 192, 193, 196, 197, 200, 201, 204, 205, 208, 209, 212, 213, 216, 217, 220, 221, 224, 225, 228, 229, 232, 233, 236, 237, 240, 241, 244, 245, 248, 249, 252, 253, 256, 257, 260, 261, 264, 265, 268, 269, 272, 273, 276, 277, 280, 281, 284, 285, 288, 289, 292, 293, 296, 297, 300, 301, 304, 305, 308, 309, 312, 313, 316, 317, 320, 321, 324, 325, 328, 329, 332, 333, 336, 337, 340, 341, 344, 345, 348, 349, 352, 353, 356, 357, 360, 361, 364, 365, 368, 369, 372, 373, 376, 377, 380, 381, 384, 385, 388, 389, 392, 393, 396, 397, 400, 401, 404, 405, 408, 409, 412, 413, 416, 417, 420, 421, 424, 425, 428, 429, 432, 433, 436, 437, 440, 441, 444, 445, 448, 449, 452, 453, 456, 457, 460, 461, 464, 465, 468, 469, 472, 473, 476, 477, 480, 481, 484, 485, 488, 489, 492, 493, 496, 497, 500, 501, 504, 505, 508, 509, 512, 513, 516, 517, 520, 521, 524, 525, 528, 529, 532, 533, 536, 537, 540, 541, 544, 545, 548, 549, 552, 553, 556, 557, 560, 561, 562, 563, 564, 565, 566, 567, 568, 569, 570, 571, 572, 573, 574, 575, 576, 577, 578, 579, 580, 581, 582, 583, 584, 585, 586, 587, 588, 589, 590, 591, 592, 593, 594, 595, 596, 597, 598, 599, 600, 601, 602, 603, 604, 605, 606, 607, 608, 609, 610, 611, 612, 613, 614, 615, 616, 617, 618, 619, 620, 621, 622, 623, 624, 625, 626, 627, 628, 629, 630, 631, 632, 633, 634, 635, 636, 637, 638, 639, 640, 641, 642, 643, 644, 645, 646, 647, 648, 649, 650, 651, 652, 653, 654, 655, 656, 657, 658, 659, 660, 661, 662, 663, 664, 665, 666, 667, 668, 669, 670, 671, 672, 673, 674, 675, 676, 677, 678, 679, 680, 681, 682, 683, 684, 685, 686, 687, 688, 689, 690, 691, 692, 693, 694, 695, 696, 697, 700, 701, 702, 703, 706, 707, 708, 709, 712, 713, 714, 715, 718, 719, 720, 721, 724, 725, 726, 727, 728, or active variants and fragments thereof, and complements thereof, including, for example, SEQ ID NOS: 1, 9, 37, 45, 49, 61, 65, 77, 101, 113, 137, 141, 145, 149, 153, 157, 169, 173, 181, 185, 189, 205, 217, 225, 233, 561, 562, 563, 564, 565, 566, 567, 568, 569, 570, 571, 572, 573, 574, 575, 576, 577, 578, 579, 580, 581, 582, 583, 584, 585, 586, 587, 588, 589, 590, 591, 592, 593, 594, 595, 596, 597, 598, 599, 600, 601, 602, 603, 604, 605, 606, 607, 608, 609, 610, 611, 612, 613, 614, 615, 616, 617, 618, 619, 620, 621, 622, 623, 624, 625, 626, 627, 628, 629, 630, 631, 632, 633, 634, 635, 636, 637, 638, 639, 640, 641, 642, 643, 644, 645, 646, 647, 648, 649, 650, 651, 652, 653, 654, 655, 656, 657, 658, 659, 660, 661, 662, 663, 664, 665, 666, 667, 668, 669, 670, 671, 672, 673, 674, 675, 676, 677, 678, 679, 680, 681, 682, 683, 684, 685, 686, 687, 688, 689, 690, 691, 692, and active variants and fragments thereof, and complements thereof, and SEQ ID NOS: 4, 140, 144, 148, 693, 694, 695, 696, 697, 700, 701, 702, 703, 706, 707, 708, 709, 712, 713, 714, 715, 718, 719, 720, 721, 724, 725, 726, 727, 728, and active variants and fragments thereof, and complements thereof. Silencing elements comprising sequences, complementary sequences, active fragments or variants of these target polynucleotides are provided which, when ingested by or when contacting the pest, decrease the expression of one or more of the target sequences and thereby controls the pest (i.e., has insecticidal activity).

[0019] As used herein, by “controlling a pest” or “controls a pest” is intended any affect on a pest that results in limiting the damage that the pest causes. Controlling a pest includes, but is not limited to, killing the pest, inhibiting development of the pest, altering fertility or growth of the pest in such a manner that the pest provides less damage to the plant, decreasing the number of offspring produced, producing less fit pests, producing pests more susceptible to predator attack, or deterring the pests from eating the plant.

[0020] Reducing the level of expression of the target polynucleotide or the polypeptide encoded thereby, in the pest results in the suppression, control, and/or killing the invading pest. Reducing the level of expression of the target sequence of the pest will reduce the pest damage by at least about 2% to at least about 6%, at least about 5% to about 50%, at least about 10% to about 60%, at least about 30% to about 70%, at least about 40% to about 80%, or at least about 50% to about 90% or greater. Hence, the methods of the invention can be utilized to control pests, particularly, Coleopteran plant pests or a Diabrotica plant pest.

[0021] Assays measuring the control of a pest are commonly known in the art, as are methods to record nodal injury score. See, for example, Oleson et al. (2005) J. Econ. Entomol. 98:1-8. See, for example, the examples below.

[0022] The invention is drawn to compositions and methods for protecting plants from a plant pest, such as Coleopteran plant pests or Diabrotica plant pests or inducing resistance in a plant to a plant pest, such as Coleopteran plant pests or Diabrotica plant pests. As used herein “Coleopteran plant pest” is used to refer to any member of the Coleoptera order. Other plant pests that may be targeted by the methods and compositions of the present invention include, but are not limited to Mexican Bean Beetle (Epilachna varivestis), and Colorado potato beetle (Leptinotarsa decemlineata),

[0023] As used herein, the term “Diabrotica plant pest” is used to refer to any member of the Diabrotica genus. Accordingly, the compositions and methods are also useful in protecting plants against any Diabrotica plant pest including, for example, Diabrotica adelpha; Diabrotica amecameca; Diabrotica balteata; Diabrotica barberi; Diabrotica biannularis; Diabrotica cristata; Diabrotica decempunctata; Diabrotica dissimilis; Diabrotica lemniscata; Diabrotica limitata (including, for example, Diabrotica limitata quindecimpuncata); Diabrotica longicornis; Diabrotica nummularis; Diabrotica porracea; Diabrotica scutellata; Diabrotica sexmaculata; Diabrotica speciosa (including, for example, Diabrotica speciosa speciosa); Diabrotica tibialis; Diabrotica undecimpunctata (including, for example, Southern corn rootworm (Diabrotica undecimpunctata), Diabrotica undecimpunctata duodecimnotata; Diabrotica undecimpunctata howardi (spotted cucumber beetle); Diabrotica undecimpunctata undecimpunctata (western spotted cucumber beetle)); Diabrotica virgifera (including, for example, Diabrotica virgifera virgifera (western corn rootworm) and Diabrotica virgifera zeae (Mexican corn rootworm)); Diabrotica viridula; Diabrotica wartensis; Diabrotica sp. JJG335; Diabrotica sp. JJG336; Diabrotica sp. JJG341; Diabrotica sp. JJG356; Diabrotica sp. JJG362; and, Diabrotica sp. JJG365.

[0024] In specific embodiments, the Diabrotica plant pest comprises D. virgifera virgifera, D. barberi, D. virgifera zeae, D. speciosa, or D. undecimpunctata howardi.

### II. Target Sequences

[0025] As used herein, a “target sequence” or “target polynucleotide” comprises any sequence in the pest that one desires to reduce the level of expression thereof. In specific embodiments, decreasing the level of the target sequence in the pest controls the pest. For instance, the target sequence may be essential for growth and development. While the target sequence can be expressed in any tissue of the pest, in specific embodiments, the sequences targeted for suppression in the pest are expressed in cells of the gut tissue of the pest, cells in the midgut of the pest, and cells lining the gut lumen or the midgut. Such target sequences can be involved in, for example, gut cell metabolism, growth or differentiation. Non-limiting examples of target sequences of the invention include a polynucleotide set forth in SEQ ID NOS: 1, 4, 5, 8, 9, 12, 13, 16, 17, 20, 21, 24, 25, 28, 29, 32, 33, 36, 37, 40, 41, 44, 45, 48, 49, 52, 53, 54, 55, 56, 57, 60, 61, 64, 65, 68, 69, 72, 73, 76, 77, 80, 81, 84, 85, 88, 89, 92, 93, 96, 97, 100, 101, 104, 105, 108, 109, 112, 113, 116, 117, 120, 121, 124, 125, 128, 129, 132, 133, 136, 137, 140, 141, 144, 145, 148, 149, 152, 153, 156, 157, 160, 161, 164, 165, 168, 169, 172, 173, 176, 177, 180, 181, 184, 185, 188, 189, 192, 193, 196, 197, 200, 201, 204, 205, 208, 209, 212, 213, 216, 217, 220, 221, 224, 225, 228, 229, 232, 233, 236, 237, 240, 241, 244, 245, 248, 249, 252, 253, 256, 257, 260, 261, 264, 265, 268, 269, 272, 273, 276, 277, 280, 281, 284, 285, 288, 289, 292, 293, 296, 297, 300, 301, 304, 305, 308, 309, 312, 313, 316, 317, 320, 321, 324, 325, 328, 329, 332, 333, 336, 337, 340, 341, 344, 345, 348, 349, 352, 353, 356, 357, 360, 361, 364, 365, 368, 369, 372, 373, 376, 377, 380, 381, 384, 385, 388, 389, 392, 393, 396, 397, 400, 401, 404, 405, 408, 409, 412, 413, 416, 417, 420, 421, 424, 425, 428, 429, 432, 433, 436, 437, 440, 441, 444, 445, 448, 449, 452, 453, 456, 457, 460, 461, 464, 465, 468, 469, 472, 473, 476, 477, 480, 481, 484, 485, 488, 489, 492, 493, 496, 497, 500, 501, 504, 505, 508, 509, 512, 513, 516, 517, 520, 521, 524, 525, 528, 529, 532, 533, 536, 537, 540, 541, 544, 545, 548, 549, 552, 553, 556, 557, 560, 561, 562, 563, 564, 565, 566, 567, 568, 569, 570, 571, 572, 573, 574, 575, 576, 577, 578, 579, 580, 581, 582, 583, 584, 585, 586, 587, 588, 589, 590, 591, 592, 593, 594, 595, 596, 597, 598, 599, 600, 601, 602, 603, 604, 605, 606, 607, 608, 609, 610, 611, 612, 613, 614, 615, 616, 617, 618, 619, 620, 621, 622, 623, 624, 625, 626, 627, 628, 629, 630, 631, 632, 633, 634, 635, 636, 637, 638, 639, 640, 641, 642, 643, 644, 645, 646, 647, 648, 649, 650, 651, 652, 653, 654, 655, 656, 657, 658, 659, 660, 661, 662, 663, 664, 665, 666, 667, 668, 669, 670, 671, 672, 673, 674, 675, 676, 677, 678, 679, 680, 681, 682, 683, 684, 685, 686, 687, 688, 689, 690, 691, 692, 693, 694, 695, 696, 697, 700, 701, 702, 703, 706, 707, 708, 709, 712, 713, 714, 715, 718, 719, 720, 721, 724, 725, 726, 727, 728, or active variants and fragments thereof, and complements thereof, including, for example, SEQ ID NOS: 1, 9, 37, 45, 49, 61, 65, 77, 101, 113, 137, 141, 145, 149, 153, 157, 169, 173, 181, 185, 189, 205, 217, 225, 233, 561, 562, 563, 564, 565, 566, 567, 568, 569, 570, 571, 572, 573, 574, 575, 576, 577, 578, 579, 580, 581, 582, 583, 584, 585, 586, 587, 588, 589, 590, 591, 592, 593, 594, 595, 596, 597, 598, 599, 600, 601, 602, 603, 604, 605, 606, 607, 608, 609, 610, 611, 612, 613, 614, 615, 616, 617, 618, 619, 620, 621, 622, 623, 624, 625, 626, 627, 628, 629, 630, 631, 632, 633, 634, 635, 636, 637, 638, 639, 640, 641, 642, 643, 644, 645, 646, 647, 648, 649, 650, 651, 652, 653, 654, 655, 656, 657, 658, 659, 660, 661, 662, 663, 664, 665, 666, 667, 668, 669, 670, 671, 672, 673, 674, 675, 676, 677, 678, 679, 680, 681, 682, 683, 684, 685, 686, 687, 688, 689, 690, 691, 692, and active variants and fragments thereof, and complements thereof, and SEQ ID NOS: 4, 140, 144, 148, 693, 694, 695, 696, 697, 700, 701, 702, 703, 706, 707, 708, 709, 712, 713, 714, 715, 718, 719, 720, 721, 724, 725, 726, 727, 728, and active variants and fragments thereof, and complements thereof. As exemplified elsewhere herein, decreasing the level of expression of one or more of these target sequences in a Coleopteran plant pest or a Diabrotica plant pest controls the pest.

### III. Silencing Elements

[0026] By “silencing element” is intended a polynucleotide which when contacted by or ingested by a pest, is capable of reducing or eliminating the level or expression of a target polynucleotide or the polypeptide encoded thereby. The silencing element employed can reduce or eliminate the expression level of the target sequence by influencing the level of the target RNA transcript or, alternatively, by influencing translation and thereby affecting the level of the encoded polypeptide. Methods to assay for functional silencing elements that are capable of reducing or eliminating the level of a sequence of interest are disclosed elsewhere herein. A single polynucleotide employed in the methods of the invention can comprise one or more silencing elements to the same or different target polynucleotides. The silencing element can be produced in vivo (i.e., in a host cell such as a plant or microorganism) or in vitro.

[0027] In specific embodiments, a silencing element may comprise a chimeric construction molecule comprising two or more sequences of the present invention. For example, the chimeric construction may be a hairpin or dsRNA as disclosed herein. A chimera may comprise two or more sequences of the present invention. In one embodiment, a chimera contemplates two complementary sequences set forth herein having some degree of mismatch between the complementary sequences such that the two sequences are not perfect complements of one another. Providing at least two different sequences in a single silencing element may allow for targeting multiple genes using one silencing element and/or for example, one expression cassette. Targeting multiple genes may allow for slowing or reducing the possibility of resistance by the pest, and providing the multiple targeting ability in one expressed molecule may reduce the expression burden of the transformed plant or plant product, or provide topical treatments that are capable of targeting multiple hosts with one application.

[0028] In specific embodiments, the target sequence is not endogenous to the plant. In other embodiments, while the silencing element controls pests, preferably the silencing element has no effect on the normal plant or plant part.

[0029] As discussed in further detail below, silencing elements can include, but are not limited to, a sense suppression element, an antisense suppression element, a double stranded RNA, a siRNA, a amiRNA, a miRNA, or a hairpin suppression element. Silencing elements of the present invention may comprise a chimera where two or more sequences of the present invention or active fragments or variants, or complements thereof, are found in the same RNA molecule. Further, a sequence of the present invention or active fragment or variant, or complement thereof, may be present as more than one copy in a DNA construct, silencing element, DNA molecule or RNA molecule. In a hairpin or dsRNA molecule, the location of a sense or antisense sequence in the molecule, for example, in which sequence is transcribed first or is located on a particular terminus of the RNA molecule, is not limiting to the invention, and the invention is not to be limited by disclosures herein of a particular location for such a sequence. Non-limiting examples of silencing elements that can be employed to decrease expression of these target Coleopteran plant pest sequences or Diabrotica plant pest sequences comprise fragments and variants of the sense or antisense sequence or consists of the sense or antisense sequence of the sequence set forth in SEQ ID NOS: 1, 4, 5, 8, 9, 12, 13, 16, 17, 20, 21, 24, 25, 28, 29, 32, 33, 36, 37, 40, 41, 44, 45, 48, 49, 52, 53, 54, 55, 56, 57, 60, 61, 64, 65, 68, 69, 72, 73, 76, 77, 80, 81, 84, 85, 88, 89, 92, 93, 96, 97, 100, 101, 104, 105, 108, 109, 112, 113, 116, 117, 120, 121, 124, 125, 128, 129, 132, 133, 136, 137, 140, 141, 144, 145, 148, 149, 152, 153, 156, 157, 160, 161, 164, 165, 168, 169, 172, 173, 176, 177, 180, 181, 184, 185, 188, 189, 192, 193, 196, 197, 200, 201, 204, 205, 208, 209, 212, 213, 216, 217, 220, 221, 224, 225, 228, 229, 232, 233, 236, 237, 240, 241, 244, 245, 248, 249, 252, 253, 256, 257, 260, 261, 264, 265, 268, 269, 272, 273, 276, 277, 280, 281, 284, 285, 288, 289, 292, 293, 296, 297, 300, 301, 304, 305, 308, 309, 312, 313, 316, 317, 320, 321, 324, 325, 328, 329, 332, 333, 336, 337, 340, 341, 344, 345, 348, 349, 352, 353, 356, 357, 360, 361, 364, 365, 368, 369, 372, 373, 376, 377, 380, 381, 384, 385, 388, 389, 392, 393, 396, 397, 400, 401, 404, 405, 408, 409, 412, 413, 416, 417, 420, 421, 424, 425, 428, 429, 432, 433, 436, 437, 440, 441, 444, 445, 448, 449, 452, 453, 456, 457, 460, 461, 464, 465, 468, 469, 472, 473, 476, 477, 480, 481, 484, 485, 488, 489, 492, 493, 496, 497, 500, 501, 504, 505, 508, 509, 512, 513, 516, 517, 520, 521, 524, 525, 528, 529, 532, 533, 536, 537, 540, 541, 544, 545, 548, 549, 552, 553, 556, 557, 560, 561, 562, 563, 564, 565, 566, 567, 568, 569, 570, 571, 572, 573, 574, 575, 576, 577, 578, 579, 580, 581, 582, 583, 584, 585, 586, 587, 588, 589, 590, 591, 592, 593, 594, 595, 596, 597, 598, 599, 600, 601, 602, 603, 604, 605, 606, 607, 608, 609, 610, 611, 612, 613, 614, 615, 616, 617, 618, 619, 620, 621, 622, 623, 624, 625, 626, 627, 628, 629, 630, 631, 632, 633, 634, 635, 636, 637, 638, 639, 640, 641, 642, 643, 644, 645, 646, 647, 648, 649, 650, 651, 652, 653, 654, 655, 656, 657, 658, 659, 660, 661, 662, 663, 664, 665, 666, 667, 668, 669, 670, 671, 672, 673, 674, 675, 676, 677, 678, 679, 680, 681, 682, 683, 684, 685, 686, 687, 688, 689, 690, 691, 692, 693, 694, 695, 696, 697, 700, 701, 702, 703, 706, 707, 708, 709, 712, 713, 714, 715, 718, 719, 720, 721, 724, 725, 726, 727, 728, or active variants and fragments thereof, and complements thereof, including, for example, SEQ ID NOS: 1, 9, 37, 45, 49, 61, 65, 77, 101, 113, 137, 141, 145, 149, 153, 157, 169, 173, 181, 185, 189, 205, 217, 225, 233, 561, 562, 563, 564, 565, 566, 567, 568, 569, 570, 571, 572, 573, 574, 575, 576, 577, 578, 579, 580, 581, 582, 583, 584, 585, 586, 587, 588, 589, 590, 591, 592, 593, 594, 595, 596, 597, 598, 599, 600, 601, 602, 603, 604, 605, 606, 607, 608, 609, 610, 611, 612, 613, 614, 615, 616, 617, 618, 619, 620, 621, 622, 623, 624, 625, 626, 627, 628, 629, 630, 631, 632, 633, 634, 635, 636, 637, 638, 639, 640, 641, 642, 643, 644, 645, 646, 647, 648, 649, 650, 651, 652, 653, 654, 655, 656, 657, 658, 659, 660, 661, 662, 663, 664, 665, 666, 667, 668, 669, 670, 671, 672, 673, 674, 675, 676, 677, 678, 679, 680, 681, 682, 683, 684, 685, 686, 687, 688, 689, 690, 691, 692, and active variants and fragments thereof, and complements thereof, and SEQ ID NOS: 4, 140, 144, 148, 693, 694, 695, 696, 697, 700, 701, 702, 703, 706, 707, 708, 709, 712, 713, 714, 715, 718, 719, 720, 721, 724, 725, 726, 727, 728, and active variants and fragments thereof, and complements thereof. The silencing element can further comprise additional sequences that advantageously effect transcription and/or the stability of a resulting transcript. For example, the silencing elements can comprise at least one thymine residue at the 3′ end. This can aid in stabilization. Thus, the silencing elements can have at least 1, 2, 3, 4, 5, 6, 7, 8, 9, 10 or more thymine residues at the 3′ end. As discussed in further detail below, enhancer suppressor elements can also be employed in conjunction with the silencing elements disclosed herein.

[0030] By “reduces” or “reducing” the expression level of a polynucleotide or a polypeptide encoded thereby is intended to mean, the polynucleotide or polypeptide level of the target sequence is statistically lower than the polynucleotide level or polypeptide level of the same target sequence in an appropriate control pest which is not exposed to (i.e., has not ingested or come into contact with) the silencing element. In particular embodiments of the invention, reducing the polynucleotide level and/or the polypeptide level of the target sequence in a pest according to the invention results in less than 95%, less than 90%, less than 80%, less than 70%, less than 60%, less than 50%, less than 40%, less than 30%, less than 20%, less than 10%, or less than 5% of the polynucleotide level, or the level of the polypeptide encoded thereby, of the same target sequence in an appropriate control pest. Methods to assay for the level of the RNA transcript, the level of the encoded polypeptide, or the activity of the polynucleotide or polypeptide are discussed elsewhere herein.

[0031] i. Sense Suppression Elements

[0032] As used herein, a “sense suppression element” comprises a polynucleotide designed to express an RNA molecule corresponding to at least a part of a target messenger RNA in the “sense” orientation. Expression of the RNA molecule comprising the sense suppression element reduces or eliminates the level of the target polynucleotide or the polypeptide encoded thereby. The polynucleotide comprising the sense suppression element may correspond to all or part of the sequence of the target polynucleotide, all or part of the 5′ and/or 3′ untranslated region of the target polynucleotide, all or part of the coding sequence of the target polynucleotide, or all or part of both the coding sequence and the untranslated regions of the target polynucleotide.

[0033] Typically, a sense suppression element has substantial sequence identity to the target polynucleotide, typically greater than about 65% sequence identity, greater than about 85% sequence identity, about 90%, 91%, 92%, 93%, 94%, 95%, 96%, 97%, 98% or 99% sequence identity. See, U.S. Pat. Nos. 5,283,184 and 5,034,323; herein incorporated by reference. The sense suppression element can be any length so long as it allows for the suppression of the targeted sequence. The sense suppression element can be, for example, 15, 16, 17, 18, 19, 20, 22, 25, 30, 50, 100, 150, 200, 250, 300, 350, 400, 450, 500, 600, 700, 900, 1000, 1100, 1200, 1300 nucleotides or longer of the target polynucleotides set forth in any of SEQ ID NOS: 1, 4, 5, 8, 9, 12, 13, 16, 17, 20, 21, 24, 25, 28, 29, 32, 33, 36, 37, 40, 41, 44, 45, 48, 49, 52, 53, 54, 55, 56, 57, 60, 61, 64, 65, 68, 69, 72, 73, 76, 77, 80, 81, 84, 85, 88, 89, 92, 93, 96, 97, 100, 101, 104, 105, 108, 109, 112, 113, 116, 117, 120, 121, 124, 125, 128, 129, 132, 133, 136, 137, 140, 141, 144, 145, 148, 149, 152, 153, 156, 157, 160, 161, 164, 165, 168, 169, 172, 173, 176, 177, 180, 181, 184, 185, 188, 189, 192, 193, 196, 197, 200, 201, 204, 205, 208, 209, 212, 213, 216, 217, 220, 221, 224, 225, 228, 229, 232, 233, 236, 237, 240, 241, 244, 245, 248, 249, 252, 253, 256, 257, 260, 261, 264, 265, 268, 269, 272, 273, 276, 277, 280, 281, 284, 285, 288, 289, 292, 293, 296, 297, 300, 301, 304, 305, 308, 309, 312, 313, 316, 317, 320, 321, 324, 325, 328, 329, 332, 333, 336, 337, 340, 341, 344, 345, 348, 349, 352, 353, 356, 357, 360, 361, 364, 365, 368, 369, 372, 373, 376, 377, 380, 381, 384, 385, 388, 389, 392, 393, 396, 397, 400, 401, 404, 405, 408, 409, 412, 413, 416, 417, 420, 421, 424, 425, 428, 429, 432, 433, 436, 437, 440, 441, 444, 445, 448, 449, 452, 453, 456, 457, 460, 461, 464, 465, 468, 469, 472, 473, 476, 477, 480, 481, 484, 485, 488, 489, 492, 493, 496, 497, 500, 501, 504, 505, 508, 509, 512, 513, 516, 517, 520, 521, 524, 525, 528, 529, 532, 533, 536, 537, 540, 541, 544, 545, 548, 549, 552, 553, 556, 557, 560, 561, 562, 563, 564, 565, 566, 567, 568, 569, 570, 571, 572, 573, 574, 575, 576, 577, 578, 579, 580, 581, 582, 583, 584, 585, 586, 587, 588, 589, 590, 591, 592, 593, 594, 595, 596, 597, 598, 599, 600, 601, 602, 603, 604, 605, 606, 607, 608, 609, 610, 611, 612, 613, 614, 615, 616, 617, 618, 619, 620, 621, 622, 623, 624, 625, 626, 627, 628, 629, 630, 631, 632, 633, 634, 635, 636, 637, 638, 639, 640, 641, 642, 643, 644, 645, 646, 647, 648, 649, 650, 651, 652, 653, 654, 655, 656, 657, 658, 659, 660, 661, 662, 663, 664, 665, 666, 667, 668, 669, 670, 671, 672, 673, 674, 675, 676, 677, 678, 679, 680, 681, 682, 683, 684, 685, 686, 687, 688, 689, 690, 691, 692, 693, 694, 695, 696, 697, 700, 701, 702, 703, 706, 707, 708, 709, 712, 713, 714, 715, 718, 719, 720, 721, 724, 725, 726, 727, 728, or active variants and fragments thereof, and complements thereof, including, for example, SEQ ID NOS: 1, 9, 37, 45, 49, 61, 65, 77, 101, 113, 137, 141, 145, 149, 153, 157, 169, 173, 181, 185, 189, 205, 217, 225, 233, 561, 562, 563, 564, 565, 566, 567, 568, 569, 570, 571, 572, 573, 574, 575, 576, 577, 578, 579, 580, 581, 582, 583, 584, 585, 586, 587, 588, 589, 590, 591, 592, 593, 594, 595, 596, 597, 598, 599, 600, 601, 602, 603, 604, 605, 606, 607, 608, 609, 610, 611, 612, 613, 614, 615, 616, 617, 618, 619, 620, 621, 622, 623, 624, 625, 626, 627, 628, 629, 630, 631, 632, 633, 634, 635, 636, 637, 638, 639, 640, 641, 642, 643, 644, 645, 646, 647, 648, 649, 650, 651, 652, 653, 654, 655, 656, 657, 658, 659, 660, 661, 662, 663, 664, 665, 666, 667, 668, 669, 670, 671, 672, 673, 674, 675, 676, 677, 678, 679, 680, 681, 682, 683, 684, 685, 686, 687, 688, 689, 690, 691, 692, and active variants and fragments thereof, and complements thereof, and SEQ ID NOS: 4, 140, 144, 148, 693, 694, 695, 696, 697, 700, 701, 702, 703, 706, 707, 708, 709, 712, 713, 714, 715, 718, 719, 720, 721, 724, 725, 726, 727, 728, and active variants and fragments thereof, and complements thereof. In other embodiments, the sense suppression element can be, for example, about 15-25, 19-35, 19-50, 25-100, 100-150, 150-200, 200-250, 250-300, 300-350, 350-400, 450-500, 500-550, 550-600, 600-650, 650-700, 700-750, 750-800, 800-850, 850-900, 900-950, 950-1000, 1000-1050, 1050-1100, 1100-1200, 1200-1300, 1300-1400, 1400-1500, 1500-1600, 1600-1700, 1700-1800 nucleotides or longer of the target polynucleotides set forth in any of SEQ ID NOS: 1, 4, 5, 8, 9, 12, 13, 16, 17, 20, 21, 24, 25, 28, 29, 32, 33, 36, 37, 40, 41, 44, 45, 48, 49, 52, 53, 54, 55, 56, 57, 60, 61, 64, 65, 68, 69, 72, 73, 76, 77, 80, 81, 84, 85, 88, 89, 92, 93, 96, 97, 100, 101, 104, 105, 108, 109, 112, 113, 116, 117, 120, 121, 124, 125, 128, 129, 132, 133, 136, 137, 140, 141, 144, 145, 148, 149, 152, 153, 156, 157, 160, 161, 164, 165, 168, 169, 172, 173, 176, 177, 180, 181, 184, 185, 188, 189, 192, 193, 196, 197, 200, 201, 204, 205, 208, 209, 212, 213, 216, 217, 220, 221, 224, 225, 228, 229, 232, 233, 236, 237, 240, 241, 244, 245, 248, 249, 252, 253, 256, 257, 260, 261, 264, 265, 268, 269, 272, 273, 276, 277, 280, 281, 284, 285, 288, 289, 292, 293, 296, 297, 300, 301, 304, 305, 308, 309, 312, 313, 316, 317, 320, 321, 324, 325, 328, 329, 332, 333, 336, 337, 340, 341, 344, 345, 348, 349, 352, 353, 356, 357, 360, 361, 364, 365, 368, 369, 372, 373, 376, 377, 380, 381, 384, 385, 388, 389, 392, 393, 396, 397, 400, 401, 404, 405, 408, 409, 412, 413, 416, 417, 420, 421, 424, 425, 428, 429, 432, 433, 436, 437, 440, 441, 444, 445, 448, 449, 452, 453, 456, 457, 460, 461, 464, 465, 468, 469, 472, 473, 476, 477, 480, 481, 484, 485, 488, 489, 492, 493, 496, 497, 500, 501, 504, 505, 508, 509, 512, 513, 516, 517, 520, 521, 524, 525, 528, 529, 532, 533, 536, 537, 540, 541, 544, 545, 548, 549, 552, 553, 556, 557, 560, 561, 562, 563, 564, 565, 566, 567, 568, 569, 570, 571, 572, 573, 574, 575, 576, 577, 578, 579, 580, 581, 582, 583, 584, 585, 586, 587, 588, 589, 590, 591, 592, 593, 594, 595, 596, 597, 598, 599, 600, 601, 602, 603, 604, 605, 606, 607, 608, 609, 610, 611, 612, 613, 614, 615, 616, 617, 618, 619, 620, 621, 622, 623, 624, 625, 626, 627, 628, 629, 630, 631, 632, 633, 634, 635, 636, 637, 638, 639, 640, 641, 642, 643, 644, 645, 646, 647, 648, 649, 650, 651, 652, 653, 654, 655, 656, 657, 658, 659, 660, 661, 662, 663, 664, 665, 666, 667, 668, 669, 670, 671, 672, 673, 674, 675, 676, 677, 678, 679, 680, 681, 682, 683, 684, 685, 686, 687, 688, 689, 690, 691, 692, 693, 694, 695, 696, 697, 700, 701, 702, 703, 706, 707, 708, 709, 712, 713, 714, 715, 718, 719, 720, 721, 724, 725, 726, 727, 728, or active variants and fragments thereof, and complements thereof, including, for example, SEQ ID NOS: 1, 9, 37, 45, 49, 61, 65, 77, 101, 113, 137, 141, 145, 149, 153, 157, 169, 173, 181, 185, 189, 205, 217, 225, 233, 561, 562, 563, 564, 565, 566, 567, 568, 569, 570, 571, 572, 573, 574, 575, 576, 577, 578, 579, 580, 581, 582, 583, 584, 585, 586, 587, 588, 589, 590, 591, 592, 593, 594, 595, 596, 597, 598, 599, 600, 601, 602, 603, 604, 605, 606, 607, 608, 609, 610, 611, 612, 613, 614, 615, 616, 617, 618, 619, 620, 621, 622, 623, 624, 625, 626, 627, 628, 629, 630, 631, 632, 633, 634, 635, 636, 637, 638, 639, 640, 641, 642, 643, 644, 645, 646, 647, 648, 649, 650, 651, 652, 653, 654, 655, 656, 657, 658, 659, 660, 661, 662, 663, 664, 665, 666, 667, 668, 669, 670, 671, 672, 673, 674, 675, 676, 677, 678, 679, 680, 681, 682, 683, 684, 685, 686, 687, 688, 689, 690, 691, 692, and active variants and fragments thereof, and complements thereof, and SEQ ID NOS: 4, 140, 144, 148, 693, 694, 695, 696, 697, 700, 701, 702, 703, 706, 707, 708, 709, 712, 713, 714, 715, 718, 719, 720, 721, 724, 725, 726, 727, 728, and active variants and fragments thereof, and complements thereof.

[0034] ii. Antisense Suppression Elements

[0035] As used herein, an “antisense suppression element” comprises a polynucleotide which is designed to express an RNA molecule complementary to all or part of a target messenger RNA. Expression of the antisense RNA suppression element reduces or eliminates the level of the target polynucleotide. The polynucleotide for use in antisense suppression may correspond to all or part of the complement of the sequence encoding the target polynucleotide, all or part of the complement of the 5′ and/or 3′ untranslated region of the target polynucleotide, all or part of the complement of the coding sequence of the target polynucleotide, or all or part of the complement of both the coding sequence and the untranslated regions of the target polynucleotide. In addition, the antisense suppression element may be fully complementary (i.e., 100% identical to the complement of the target sequence) or partially complementary (i.e., less than 100% identical to the complement of the target sequence) to the target polynucleotide. In specific embodiments, the antisense suppression element comprises at least 85%, 90%, 91%, 92%, 93%, 94%, 95%, 96%, 97%, 98%, or 99% sequence complementarity to the target polynucleotide. Antisense suppression may be used to inhibit the expression of multiple proteins in the same plant. See, for example, U.S. Pat. No. 5,942,657. Furthermore, the antisense suppression element can be complementary to a portion of the target polynucleotide. Generally, sequences of at least 15, 16, 17, 18, 19, 20, 22, 25, 50, 100, 200, 300, 400, 450 nucleotides or greater of the sequence set forth in any of SEQ ID NOS: 1, 4, 5, 8, 9, 12, 13, 16, 17, 20, 21, 24, 25, 28, 29, 32, 33, 36, 37, 40, 41, 44, 45, 48, 49, 52, 53, 54, 55, 56, 57, 60, 61, 64, 65, 68, 69, 72, 73, 76, 77, 80, 81, 84, 85, 88, 89, 92, 93, 96, 97, 100, 101, 104, 105, 108, 109, 112, 113, 116, 117, 120, 121, 124, 125, 128, 129, 132, 133, 136, 137, 140, 141, 144, 145, 148, 149, 152, 153, 156, 157, 160, 161, 164, 165, 168, 169, 172, 173, 176, 177, 180, 181, 184, 185, 188, 189, 192, 193, 196, 197, 200, 201, 204, 205, 208, 209, 212, 213, 216, 217, 220, 221, 224, 225, 228, 229, 232, 233, 236, 237, 240, 241, 244, 245, 248, 249, 252, 253, 256, 257, 260, 261, 264, 265, 268, 269, 272, 273, 276, 277, 280, 281, 284, 285, 288, 289, 292, 293, 296, 297, 300, 301, 304, 305, 308, 309, 312, 313, 316, 317, 320, 321, 324, 325, 328, 329, 332, 333, 336, 337, 340, 341, 344, 345, 348, 349, 352, 353, 356, 357, 360, 361, 364, 365, 368, 369, 372, 373, 376, 377, 380, 381, 384, 385, 388, 389, 392, 393, 396, 397, 400, 401, 404, 405, 408, 409, 412, 413, 416, 417, 420, 421, 424, 425, 428, 429, 432, 433, 436, 437, 440, 441, 444, 445, 448, 449, 452, 453, 456, 457, 460, 461, 464, 465, 468, 469, 472, 473, 476, 477, 480, 481, 484, 485, 488, 489, 492, 493, 496, 497, 500, 501, 504, 505, 508, 509, 512, 513, 516, 517, 520, 521, 524, 525, 528, 529, 532, 533, 536, 537, 540, 541, 544, 545, 548, 549, 552, 553, 556, 557, 560, 561, 562, 563, 564, 565, 566, 567, 568, 569, 570, 571, 572, 573, 574, 575, 576, 577, 578, 579, 580, 581, 582, 583, 584, 585, 586, 587, 588, 589, 590, 591, 592, 593, 594, 595, 596, 597, 598, 599, 600, 601, 602, 603, 604, 605, 606, 607, 608, 609, 610, 611, 612, 613, 614, 615, 616, 617, 618, 619, 620, 621, 622, 623, 624, 625, 626, 627, 628, 629, 630, 631, 632, 633, 634, 635, 636, 637, 638, 639, 640, 641, 642, 643, 644, 645, 646, 647, 648, 649, 650, 651, 652, 653, 654, 655, 656, 657, 658, 659, 660, 661, 662, 663, 664, 665, 666, 667, 668, 669, 670, 671, 672, 673, 674, 675, 676, 677, 678, 679, 680, 681, 682, 683, 684, 685, 686, 687, 688, 689, 690, 691, 692, 693, 694, 695, 696, 697, 700, 701, 702, 703, 706, 707, 708, 709, 712, 713, 714, 715, 718, 719, 720, 721, 724, 725, 726, 727, 728, or active variants and fragments thereof, and complements thereof, including, for example, SEQ ID NOS: 1, 9, 37, 45, 49, 61, 65, 77, 101, 113, 137, 141, 145, 149, 153, 157, 169, 173, 181, 185, 189, 205, 217, 225, 233, 561, 562, 563, 564, 565, 566, 567, 568, 569, 570, 571, 572, 573, 574, 575, 576, 577, 578, 579, 580, 581, 582, 583, 584, 585, 586, 587, 588, 589, 590, 591, 592, 593, 594, 595, 596, 597, 598, 599, 600, 601, 602, 603, 604, 605, 606, 607, 608, 609, 610, 611, 612, 613, 614, 615, 616, 617, 618, 619, 620, 621, 622, 623, 624, 625, 626, 627, 628, 629, 630, 631, 632, 633, 634, 635, 636, 637, 638, 639, 640, 641, 642, 643, 644, 645, 646, 647, 648, 649, 650, 651, 652, 653, 654, 655, 656, 657, 658, 659, 660, 661, 662, 663, 664, 665, 666, 667, 668, 669, 670, 671, 672, 673, 674, 675, 676, 677, 678, 679, 680, 681, 682, 683, 684, 685, 686, 687, 688, 689, 690, 691, 692, and active variants and fragments thereof, and complements thereof, and SEQ ID NOS: 4, 140, 144, 148, 693, 694, 695, 696, 697, 700, 701, 702, 703, 706, 707, 708, 709, 712, 713, 714, 715, 718, 719, 720, 721, 724, 725, 726, 727, 728, and active variants and fragments thereof, and complements thereof may be used. Methods for using antisense suppression to inhibit the expression of endogenous genes in plants are described, for example, in Liu et al (2002) Plant Physiol. 129:1732-1743 and U.S. Pat. Nos. 5,759,829 and 5,942,657, each of which is herein incorporated by reference.

[0036] iii. Double Stranded RNA Suppression Element

[0037] A “double stranded RNA silencing element” or “dsRNA” comprises at least one transcript that is capable of forming a dsRNA either before or after ingestion by a pest. Thus, a “dsRNA silencing element” includes a dsRNA, a transcript or polyribonucleotide capable of forming a dsRNA or more than one transcript or polyribonucleotide capable of forming a dsRNA. “Double stranded RNA” or “dsRNA” refers to a polyribonucleotide structure formed either by a single self-complementary RNA molecule or a polyribonucleotide structure formed by the expression of at least two distinct RNA strands. The dsRNA molecule(s) employed in the methods and compositions of the invention mediate the reduction of expression of a target sequence, for example, by mediating RNA interference “RNAi” or gene silencing in a sequence-specific manner. In the context of the present invention, the dsRNA is capable of reducing or eliminating the level or expression of a target polynucleotide or the polypeptide encoded thereby in a pest.

[0038] The dsRNA can reduce or eliminate the expression level of the target sequence by influencing the level of the target RNA transcript, by influencing translation and thereby affecting the level of the encoded polypeptide, or by influencing expression at the pre-transcriptional level (i.e., via the modulation of chromatin structure, methylation pattern, etc., to alter gene expression). See, for example, Verdel et al. (2004) Science 303:672-676; Pal-Bhadra et al. (2004) Science 303:669-672; Allshire (2002) Science 297:1818-1819; Volpe et al. (2002) Science 297:1833-1837; Jenuwein (2002) Science 297:2215-2218; and Hall et al. (2002) Science 297:2232-2237. Methods to assay for functional dsRNA that are capable of reducing or eliminating the level of a sequence of interest are disclosed elsewhere herein. Accordingly, as used herein, the term “dsRNA” is meant to encompass other terms used to describe nucleic acid molecules that are capable of mediating RNA interference or gene silencing, including, for example, short-interfering RNA (siRNA), double-stranded RNA (dsRNA), micro-RNA (miRNA), hairpin RNA, short hairpin RNA (shRNA), post-transcriptional gene silencing RNA (ptgsRNA), and others.

[0039] In specific embodiments, at least one strand of the duplex or double-stranded region of the dsRNA shares sufficient sequence identity or sequence complementarity to the target polynucleotide to allow for the dsRNA to reduce the level of expression of the target sequence. As used herein, the strand that is complementary to the target polynucleotide is the “antisense strand” and the strand homologous to the target polynucleotide is the “sense strand.”

[0040] In another embodiment, the dsRNA comprises a hairpin RNA. A hairpin RNA comprises an RNA molecule that is capable of folding back onto itself to form a double stranded structure. Multiple structures can be employed as hairpin elements. In specific embodiments, the dsRNA suppression element comprises a hairpin element which comprises in the following order, a first segment, a second segment, and a third segment, where the first and the third segment share sufficient complementarity to allow the transcribed RNA to form a double-stranded stem-loop structure.

[0041] The “second segment” of the hairpin comprises a “loop” or a “loop region.” These terms are used synonymously herein and are to be construed broadly to comprise any nucleotide sequence that confers enough flexibility to allow self-pairing to occur between complementary regions of a polynucleotide (i.e., segments 1 and 3 which form the stem of the hairpin). For example, in some embodiments, the loop region may be substantially single stranded and act as a spacer between the self-complementary regions of the hairpin stem-loop. In some embodiments, the loop region can comprise a random or nonsense nucleotide sequence and thus not share sequence identity to a target polynucleotide. In other embodiments, the loop region comprises a sense or an antisense RNA sequence or fragment thereof that shares identity to a target polynucleotide. See, for example, International Patent Publication No. WO 02/00904, herein incorporated by reference. In specific embodiments, the loop region can be optimized to be as short as possible while still providing enough intramolecular flexibility to allow the formation of the base-paired stem region. Accordingly, the loop sequence is generally less than 1000, 900, 800, 700, 600, 500, 400, 300, 200, 100, 50, 25, 20, 19, 18, 17, 16, 15, 10 nucleotides or less.

[0042] The “first” and the “third” segment of the hairpin RNA molecule comprise the base-paired stem of the hairpin structure. The first and the third segments are inverted repeats of one another and share sufficient complementarity to allow the formation of the base-paired stem region. In specific embodiments, the first and the third segments are fully complementary to one another. Alternatively, the first and the third segment may be partially complementary to each other so long as they are capable of hybridizing to one another to form a base-paired stem region. The amount of complementarity between the first and the third segment can be calculated as a percentage of the entire segment. Thus, the first and the third segment of the hairpin RNA generally share at least 50%, 60%, 70%, 80%, 85%, 90%, 91%, 92%, 93%, 94%, 95%, 96%, 97%, 98%, 99%, up to and including 100% complementarity.

[0043] The first and the third segment are at least about 1000, 500, 475, 450, 425, 400, 375, 350, 325, 300, 250, 225, 200, 175, 150, 125, 100, 75, 60, 50, 40, 30, 25, 22, 20, 19, 18, 17, 16, 15 or 10 nucleotides in length. In specific embodiments, the length of the first and/or the third segment is about 10-100 nucleotides, about 10 to about 75 nucleotides, about 10 to about 50 nucleotides, about 10 to about 40 nucleotides, about 10 to about 35 nucleotides, about 10 to about 30 nucleotides, about 10 to about 25 nucleotides, about 10 to about 19 nucleotides, about 10 to about 20 nucleotides, about 19 to about 50 nucleotides, about 50 nucleotides to about 100 nucleotides, about 100 nucleotides to about 150 nucleotides, about 100 nucleotides to about 300 nucleotides, about 150 nucleotides to about 200 nucleotides, about 200 nucleotides to about 250 nucleotides, about 250 nucleotides to about 300 nucleotides, about 300 nucleotides to about 350 nucleotides, about 350 nucleotides to about 400 nucleotides, about 400 nucleotide to about 500 nucleotides, about 600 nt, about 700 nt, about 800 nt, about 900 nt, about 1000 nt, about 1100 nt, about 1200 nt, 1300 nt, 1400 nt, 1500 nt, 1600 nt, 1700 nt, 1800 nt, 1900 nt, 2000 nt or longer. In other embodiments, the length of the first and/or the third segment comprises at least 10-19 nucleotides, 10-20 nucleotides; 19-35 nucleotides, 20-35 nucleotides; 30-45 nucleotides; 40-50 nucleotides; 50-100 nucleotides; 100-300 nucleotides; about 500-700 nucleotides; about 700-900 nucleotides; about 900-1100 nucleotides; about 1300-1500 nucleotides; about 1500-1700 nucleotides; about 1700-1900 nucleotides; about 1900-2100 nucleotides; about 2100-2300 nucleotides; or about 2300-2500 nucleotides. See, for example, International Publication No. WO 0200904.

[0044] Hairpin molecules or double-stranded RNA molecules of the present invention may have more than one sequence of the present invention or active fragments or variants, or complements thereof, found in the same portion of the RNA molecule. For example, in a chimeric hairpin structure, the first segment of a hairpin molecule comprises two polynucleotide sections, each with a different sequence of the present invention. For example, reading from one terminus of the hairpin, the first segment is composed of sequences from two separate genes (A followed by B). This first segment is followed by the second segment, the loop portion of the hairpin. The loop segment is followed by the third segment, where the complementary strands of the sequences in the first segment are found (B* followed by A*) in forming the stem-loop, hairpin structure, the stem contains SeqA-A* at the distal end of the stem and SeqB-B* proximal to the loop region.

[0045] In specific embodiments, the first and the third segment comprise at least 20 nucleotides having at least 85% complementary to the first segment. In still other embodiments, the first and the third segments which form the stem-loop structure of the hairpin comprises 3′ or 5′ overhang regions having unpaired nucleotide residues.

[0046] In specific embodiments, the sequences used in the first, the second, and/or the third segments comprise domains that are designed to have sufficient sequence identity to a target polynucleotide of interest and thereby have the ability to decrease the level of expression of the target polynucleotide. The specificity of the inhibitory RNA transcripts is therefore generally conferred by these domains of the silencing element. Thus, in some embodiments of the invention, the first, second and/or third segment of the silencing element comprise a domain having at least 10, at least 15, at least 19, at least 20, at least 21, at least 22, at least 23, at least 24, at least 25, at least 30, at least 40, at least 50, at least 100, at least 200, at least 300, at least 500, at least 1000, or more than 1000 nucleotides that share sufficient sequence identity to the target polynucleotide to allow for a decrease in expression levels of the target polynucleotide when expressed in an appropriate cell. In other embodiments, the domain is between about 15 to 50 nucleotides, about 19-35 nucleotides, about 20-35 nucleotides, about 25-50 nucleotides, about 19 to 75 nucleotides, about 20 to 75 nucleotides, about 40-90 nucleotides about 15-100 nucleotides 10-100 nucleotides, about 10 to about 75 nucleotides, about 10 to about 50 nucleotides, about 10 to about 40 nucleotides, about 10 to about 35 nucleotides, about 10 to about 30 nucleotides, about 10 to about 25 nucleotides, about 10 to about 20 nucleotides, about 10 to about 19 nucleotides, about 50 nucleotides to about 100 nucleotides, about 100 nucleotides to about 150 nucleotides, about 150 nucleotides to about 200 nucleotides, about 200 nucleotides to about 250 nucleotides, about 250 nucleotides to about 300 nucleotides, about 300 nucleotides to about 350 nucleotides, about 350 nucleotides to about 400 nucleotides, about 400 nucleotide to about 500 nucleotides or longer. In other embodiments, the length of the first and/or the third segment comprises at least 10-20 nucleotides, at least 10-19 nucleotides, 20-35 nucleotides, 30-45 nucleotides, 40-50 nucleotides, 50-100 nucleotides, or about 100-300 nucleotides.

[0047] In specific embodiments, the domain of the first, the second, and/or the third segment has 100% sequence identity to the target polynucleotide. In other embodiments, the domain of the first, the second and/or the third segment having homology to the target polypeptide have at least 50%, 60%, 70%, 80%, 85%, 90%, 91%, 92%, 93%, 94%, 95%, 96%, 97%, 98%, 99%, or greater sequence identity to a region of the target polynucleotide. The sequence identity of the domains of the first, the second and/or the third segments to the target polynucleotide need only be sufficient to decrease expression of the target polynucleotide of interest. See, for example, Chuang and Meyerowitz (2000) Proc. Natl. Acad. Sci. USA 97:4985-4990; Stoutjesdijk et al. (2002) Plant Physiol. 129:1723-1731; Waterhouse and Helliwell (2003) Nat. Rev. Genet. 4:29-38; Pandolfini et al. BMC Biotechnology 3:7, and U.S. Patent Publication No. 20030175965; each of which is herein incorporated by reference. A transient assay for the efficiency of hpRNA constructs to silence gene expression in vivo has been described by Panstruga et al. (2003) Mol. Biol. Rep. 30:135-140, herein incorporated by reference.

[0048] The amount of complementarity shared between the first, second, and/or third segment and the target polynucleotide or the amount of complementarity shared between the first segment and the third segment (i.e., the stem of the hairpin structure) may vary depending on the organism in which gene expression is to be controlled. Some organisms or cell types may require exact pairing or 100% identity, while other organisms or cell types may tolerate some mismatching. In some cells, for example, a single nucleotide mismatch in the targeting sequence abrogates the ability to suppress gene expression. In these cells, the suppression cassettes of the invention can be used to target the suppression of mutant genes, for example, oncogenes whose transcripts comprise point mutations and therefore they can be specifically targeted using the methods and compositions of the invention without altering the expression of the remaining wild-type allele. In other organisms, holistic sequence variability may be tolerated as long as some 22nt region of the sequence is represented in 100% homology between target polynucleotide and the suppression cassette.

[0049] Any region of the target polynucleotide can be used to design the domain of the silencing element that shares sufficient sequence identity to allow expression of the hairpin transcript to decrease the level of the target polynucleotide. For instance, the domain can be designed to share sequence identity to the 5′ untranslated region of the target polynucleotide(s), the 3′ untranslated region of the target polynucleotide(s), exonic regions of the target polynucleotide(s), intronic regions of the target polynucleotide(s), and any combination thereof. In specific embodiments, a domain of the silencing element shares sufficient homology to at least about 15, 16, 17, 18, 19, 20, 22, 25 or 30 consecutive nucleotides from about nucleotides 1-50, 25-75, 75-125, 50-100, 125-175, 175-225, 100-150, 150-200, 200-250, 225-275, 275-325, 250-300, 325-375, 375-425, 300-350, 350-400, 425-475, 400-450, 475-525, 450-500, 525-575, 575-625, 550-600, 625-675, 675-725, 600-650, 625-675, 675-725, 650-700, 725-825, 825-875, 750-800, 875-925, 925-975, 850-900, 925-975, 975-1025, 950-1000, 1000-1050, 1025-1075, 1075-1125, 1050-1100, 1125-1175, 1100-1200, 1175-1225, 1225-1275, 1200-1300, 1325-1375, 1375-1425, 1300-1400, 1425-1475, 1475-1525, 1400-1500, 1525-1575, 1575-1625, 1625-1675, 1675-1725, 1725-1775, 1775-1825, 1825-1875, 1875-1925, 1925-1975, 1975-2025, 2025-2075, 2075-2125, 2125-2175, 2175-2225, 1500-1600, 1600-1700, 1700-1800, 1800-1900, 1900-2000 of the target sequence. In some instances to optimize the siRNA sequences employed in the hairpin, the synthetic oligodeoxyribonucleotide/RNAse H method can be used to determine sites on the target mRNA that are in a conformation that is susceptible to RNA silencing. See, for example, Vickers et al. (2003) J. Biol. Chem 278:7108-7118 and Yang et al. (2002) Proc. Natl. Acad. Sci. USA 99:9442-9447, herein incorporated by reference. These studies indicate that there is a significant correlation between the RNase-H-sensitive sites and sites that promote efficient siRNA-directed mRNA degradation.

[0050] The hairpin silencing element may also be designed such that the sense sequence or the antisense sequence do not correspond to a target polynucleotide. In this embodiment, the sense and antisense sequence flank a loop sequence that comprises a nucleotide sequence corresponding to all or part of the target polynucleotide. Thus, it is the loop region that determines the specificity of the RNA interference. See, for example, WO 02/00904, herein incorporated by reference.

[0051] In addition, transcriptional gene silencing (TGS) may be accomplished through use of a hairpin suppression element where the inverted repeat of the hairpin shares sequence identity with the promoter region of a target polynucleotide to be silenced. See, for example, Aufsatz et al. (2002) PNAS 99 (Suppl. 4):16499-16506 and Mette et al. (2000) EMBO J 19(19):5194-5201.

[0052] In other embodiments, the silencing element can comprise a small RNA (sRNA). sRNAs can comprise both micro RNA (miRNA) and short-interfering RNA (siRNA) (Meister and Tuschl (2004) Nature 431:343-349 and Bonetta et al. (2004) Nature Methods 1:79-86). miRNAs are regulatory agents comprising about 19 to about 24 ribonucleotides in length which are highly efficient at inhibiting the expression of target polynucleotides. See, for example Javier et al. (2003) Nature 425: 257-263, herein incorporated by reference. For miRNA interference, the silencing element can be designed to express a dsRNA molecule that forms a hairpin structure or partially base-paired structure containing 19, 20, 21, 22, 23, 24 or 25-nucleotide sequence that is complementary to the target polynucleotide of interest. The miRNA can be synthetically made, or transcribed as a longer RNA which is subsequently cleaved to produce the active miRNA. Specifically, the miRNA can comprise 19 nucleotides of the sequence having homology to a target polynucleotide in sense orientation and 19 nucleotides of a corresponding antisense sequence that is complementary to the sense sequence. The miRNA can be an “artificial miRNA” or “amiRNA” which comprises a miRNA sequence that is synthetically designed to silence a target sequence.

[0053] When expressing an miRNA the final (mature) miRNA is present in a duplex in a precursor backbone structure, the two strands being referred to as the miRNA (the strand that will eventually basepair with the target) and miRNA*(star sequence). It has been demonstrated that miRNAs can be transgenically expressed and target genes of interest efficiently silenced (Highly specific gene silencing by artificial microRNAs in Arabidopsis Schwab R, Ossowski S, Riester M, Warthmann N, Weigel D. Plant Cell. 2006 May; 18(5):1121-33. Epub 2006 Mar. 10 & Expression of artificial microRNAs in transgenic Arabidopsis thaliana confers virus resistance. Niu Q W, Lin S S, Reyes J L, Chen K C, Wu H W, Yeh S D, Chua N H. Nat Biotechnol. 2006 November; 24(11):1420-8. Epub 2006 Oct. 22. Erratum in: Nat Biotechnol. 2007 February; 25(2):254.)

[0054] The silencing element for miRNA interference comprises a miRNA primary sequence. The miRNA primary sequence comprises a DNA sequence having the miRNA and star sequences separated by a loop as well as additional sequences flanking this region that are important for processing. When expressed as an RNA, the structure of the primary miRNA is such as to allow for the formation of a hairpin RNA structure that can be processed into a mature miRNA. In some embodiments, the miRNA backbone comprises a genomic or cDNA miRNA precursor sequence, wherein said sequence comprises a native primary in which a heterologous (artificial) mature miRNA and star sequence are inserted.

[0055] As used herein, a “star sequence” is the sequence within a miRNA precursor backbone that is complementary to the miRNA and forms a duplex with the miRNA to form the stem structure of a hairpin RNA. In some embodiments, the star sequence can comprise less than 100% complementarity to the miRNA sequence. Alternatively, the star sequence can comprise at least 99%, 98%, 97%, 96%, 95%, 90%, 85%, 80% or lower sequence complementarity to the miRNA sequence as long as the star sequence has sufficient complementarity to the miRNA sequence to form a double stranded structure. In still further embodiments, the star sequence comprises a sequence having 1, 2, 3, 4, 5 or more mismatches with the miRNA sequence and still has sufficient complementarity to form a double stranded structure with the miRNA sequence resulting in production of miRNA and suppression of the target sequence.

[0056] The miRNA precursor backbones can be from any plant. In some embodiments, the miRNA precursor backbone is from a monocot. In other embodiments, the miRNA precursor backbone is from a dicot. In further embodiments, the backbone is from maize or soybean. MicroRNA precursor backbones have been described previously. For example, US20090155910A1 (WO 2009/079532) discloses the following soybean miRNA precursor backbones: 156c, 159, 166b, 168c, 396b and 398b, and US20090155909A1 (WO 2009/079548) discloses the following maize miRNA precursor backbones: 159c, 164h, 168a, 169r, and 396h. Each of these references is incorporated by reference in their entirety.

[0057] Thus, the primary miRNA can be altered to allow for efficient insertion of heterologous miRNA and star sequences within the miRNA precursor backbone. In such instances, the miRNA segment and the star segment of the miRNA precursor backbone are replaced with the heterologous miRNA and the heterologous star sequences, designed to target any sequence of interest, using a PCR technique and cloned into an expression construct. It is recognized that there could be alterations to the position at which the artificial miRNA and star sequences are inserted into the backbone. Detailed methods for inserting the miRNA and star sequence into the miRNA precursor backbone are described in, for example, US Patent Applications 20090155909A1 and US20090155910A1, herein incorporated by reference in their entirety.

[0058] When designing a miRNA sequence and star sequence, various design choices can be made. See, for example, Schwab R, et al. (2005) Dev Cell 8: 517-27. In non-limiting embodiments, the miRNA sequences disclosed herein can have a “U” at the 5′-end, a “C” or “G” at the 19th nucleotide position, and an “A” or “U” at the 10th nucleotide position. In other embodiments, the miRNA design is such that the miRNA have a high free delta-G as calculated using the ZipFold algorithm (Markham, N. R. & Zuker, M. (2005) Nucleic Acids Res. 33: W577-W581.) Optionally, a one base pair change can be added within the 5′ portion of the miRNA so that the sequence differs from the target sequence by one nucleotide.

[0059] The methods and compositions of the invention employ silencing elements that when transcribed “form” a dsRNA molecule. Accordingly, the heterologous polynucleotide being expressed need not form the dsRNA by itself, but can interact with other sequences in the plant cell or in the pest gut after ingestion to allow the formation of the dsRNA. For example, a chimeric polynucleotide that can selectively silence the target polynucleotide can be generated by expressing a chimeric construct comprising the target sequence for a miRNA or siRNA to a sequence corresponding to all or part of the gene or genes to be silenced. In this embodiment, the dsRNA is “formed” when the target for the miRNA or siRNA interacts with the miRNA present in the cell. The resulting dsRNA can then reduce the level of expression of the gene or genes to be silenced. See, for example, US Application Publication 2007-0130653, entitled “Methods and Compositions for Gene Silencing”, herein incorporated by reference. The construct can be designed to have a target for an endogenous miRNA or alternatively, a target for a heterologous and/or synthetic miRNA can be employed in the construct. If a heterologous and/or synthetic miRNA is employed, it can be introduced into the cell on the same nucleotide construct as the chimeric polynucleotide or on a separate construct. As discussed elsewhere herein, any method can be used to introduce the construct comprising the heterologous miRNA.

### IV. Variants and Fragments

[0060] By “fragment” is intended a portion of the polynucleotide or a portion of the amino acid sequence and hence protein encoded thereby. Fragments of a polynucleotide may encode protein fragments that retain the biological activity of the native protein. Alternatively, fragments of a polynucleotide that are useful as a silencing element do not need to encode fragment proteins that retain biological activity. Thus, fragments of a nucleotide sequence may range from at least about 10, about 15, about 16, about 17, about 18, about 19, nucleotides, about 20 nucleotides, about 22 nucleotides, about 50 nucleotides, about 75 nucleotides, about 100 nucleotides, 200 nucleotides, 300 nucleotides, 400 nucleotides, 500 nucleotides, 600 nucleotides, 700 nucleotides and up to the full-length polynucleotide employed in the invention. Alternatively, fragments of a nucleotide sequence may range from 1-50, 25-75, 75-125, 50-100, 125-175, 175-225, 100-150, 100-300, 150-200, 200-250, 225-275, 275-325, 250-300, 325-375, 375-425, 300-350, 350-400, 425-475, 400-450, 475-525, 450-500, 525-575, 575-625, 550-600, 625-675, 675-725, 600-650, 625-675, 675-725, 650-700, 725-825, 825-875, 750-800, 875-925, 925-975, 850-900, 925-975, 975-1025, 950-1000, 1000-1050, 1025-1075, 1075-1125, 1050-1100, 1125-1175, 1100-1200, 1175-1225, 1225-1275, 1200-1300, 1325-1375, 1375-1425, 1300-1400, 1425-1475, 1475-1525, 1400-1500, 1525-1575, 1575-1625, 1625-1675, 1675-1725, 1725-1775, 1775-1825, 1825-1875, 1875-1925, 1925-1975, 1975-2025, 2025-2075, 2075-2125, 2125-2175, 2175-2225, 1500-1600, 1600-1700, 1700-1800, 1800-1900, 1900-2000 of any one of SEQ ID NOS: 1, 4, 5, 8, 9, 12, 13, 16, 17, 20, 21, 24, 25, 28, 29, 32, 33, 36, 37, 40, 41, 44, 45, 48, 49, 52, 53, 54, 55, 56, 57, 60, 61, 64, 65, 68, 69, 72, 73, 76, 77, 80, 81, 84, 85, 88, 89, 92, 93, 96, 97, 100, 101, 104, 105, 108, 109, 112, 113, 116, 117, 120, 121, 124, 125, 128, 129, 132, 133, 136, 137, 140, 141, 144, 145, 148, 149, 152, 153, 156, 157, 160, 161, 164, 165, 168, 169, 172, 173, 176, 177, 180, 181, 184, 185, 188, 189, 192, 193, 196, 197, 200, 201, 204, 205, 208, 209, 212, 213, 216, 217, 220, 221, 224, 225, 228, 229, 232, 233, 236, 237, 240, 241, 244, 245, 248, 249, 252, 253, 256, 257, 260, 261, 264, 265, 268, 269, 272, 273, 276, 277, 280, 281, 284, 285, 288, 289, 292, 293, 296, 297, 300, 301, 304, 305, 308, 309, 312, 313, 316, 317, 320, 321, 324, 325, 328, 329, 332, 333, 336, 337, 340, 341, 344, 345, 348, 349, 352, 353, 356, 357, 360, 361, 364, 365, 368, 369, 372, 373, 376, 377, 380, 381, 384, 385, 388, 389, 392, 393, 396, 397, 400, 401, 404, 405, 408, 409, 412, 413, 416, 417, 420, 421, 424, 425, 428, 429, 432, 433, 436, 437, 440, 441, 444, 445, 448, 449, 452, 453, 456, 457, 460, 461, 464, 465, 468, 469, 472, 473, 476, 477, 480, 481, 484, 485, 488, 489, 492, 493, 496, 497, 500, 501, 504, 505, 508, 509, 512, 513, 516, 517, 520, 521, 524, 525, 528, 529, 532, 533, 536, 537, 540, 541, 544, 545, 548, 549, 552, 553, 556, 557, 560, 561, 562, 563, 564, 565, 566, 567, 568, 569, 570, 571, 572, 573, 574, 575, 576, 577, 578, 579, 580, 581, 582, 583, 584, 585, 586, 587, 588, 589, 590, 591, 592, 593, 594, 595, 596, 597, 598, 599, 600, 601, 602, 603, 604, 605, 606, 607, 608, 609, 610, 611, 612, 613, 614, 615, 616, 617, 618, 619, 620, 621, 622, 623, 624, 625, 626, 627, 628, 629, 630, 631, 632, 633, 634, 635, 636, 637, 638, 639, 640, 641, 642, 643, 644, 645, 646, 647, 648, 649, 650, 651, 652, 653, 654, 655, 656, 657, 658, 659, 660, 661, 662, 663, 664, 665, 666, 667, 668, 669, 670, 671, 672, 673, 674, 675, 676, 677, 678, 679, 680, 681, 682, 683, 684, 685, 686, 687, 688, 689, 690, 691, 692, 693, 694, 695, 696, 697, 700, 701, 702, 703, 706, 707, 708, 709, 712, 713, 714, 715, 718, 719, 720, 721, 724, 725, 726, 727, 728, or active variants and fragments thereof, and complements thereof, including, for example, SEQ ID NOS: 1, 9, 37, 45, 49, 61, 65, 77, 101, 113, 137, 141, 145, 149, 153, 157, 169, 173, 181, 185, 189, 205, 217, 225, 233, 561, 562, 563, 564, 565, 566, 567, 568, 569, 570, 571, 572, 573, 574, 575, 576, 577, 578, 579, 580, 581, 582, 583, 584, 585, 586, 587, 588, 589, 590, 591, 592, 593, 594, 595, 596, 597, 598, 599, 600, 601, 602, 603, 604, 605, 606, 607, 608, 609, 610, 611, 612, 613, 614, 615, 616, 617, 618, 619, 620, 621, 622, 623, 624, 625, 626, 627, 628, 629, 630, 631, 632, 633, 634, 635, 636, 637, 638, 639, 640, 641, 642, 643, 644, 645, 646, 647, 648, 649, 650, 651, 652, 653, 654, 655, 656, 657, 658, 659, 660, 661, 662, 663, 664, 665, 666, 667, 668, 669, 670, 671, 672, 673, 674, 675, 676, 677, 678, 679, 680, 681, 682, 683, 684, 685, 686, 687, 688, 689, 690, 691, 692, and active variants and fragments thereof, and complements thereof, and SEQ ID NOS: 4, 140, 144, 148, 693, 694, 695, 696, 697, 700, 701, 702, 703, 706, 707, 708, 709, 712, 713, 714, 715, 718, 719, 720, 721, 724, 725, 726, 727, 728, and active variants and fragments thereof, and complements thereof. Methods to assay for the activity of a desired silencing element are described elsewhere herein.

[0061] “Variants” is intended to mean substantially similar sequences. For polynucleotides, a variant comprises a deletion and/or addition of one or more nucleotides at one or more internal sites within the native polynucleotide and/or a substitution of one or more nucleotides at one or more sites in the native polynucleotide. A variant of a polynucleotide that is useful as a silencing element will retain the ability to reduce expression of the target polynucleotide and, in some embodiments, thereby control a pest of interest. As used herein, a “native” polynucleotide or polypeptide comprises a naturally occurring nucleotide sequence or amino acid sequence, respectively. For polynucleotides, conservative variants include those sequences that, because of the degeneracy of the genetic code, encode the amino acid sequence of one of the polypeptides employed in the invention. Variant polynucleotides also include synthetically derived polynucleotide, such as those generated, for example, by using site-directed mutagenesis, but continue to retain the desired activity. Generally, variants of a particular polynucleotide of the invention (i.e., a silencing element) will have at least about 40%, 45%, 50%, 55%, 60%, 65%, 70%, 75%, 80%, 85%, 90%, 91%, 92%, 93%, 94%, 95%, 96%, 97%, 98%, 99% or more sequence identity to that particular polynucleotide as determined by sequence alignment programs and parameters described elsewhere herein.

[0062] Variants of a particular polynucleotide of the invention (i.e., the reference polynucleotide) can also be evaluated by comparison of the percent sequence identity between the polypeptide encoded by a variant polynucleotide and the polypeptide encoded by the reference polynucleotide. Percent sequence identity between any two polypeptides can be calculated using sequence alignment programs and parameters described elsewhere herein. Where any given pair of polynucleotides employed in the invention is evaluated by comparison of the percent sequence identity shared by the two polypeptides they encode, the percent sequence identity between the two encoded polypeptides is at least about 40%, 45%, 50%, 55%, 60%, 65%, 70%, 75%, 80%, 85%, 90%, 91%, 92%, 93%, 94%, 95%, 96%, 97%, 98%, 99% or more sequence identity.

[0063] The following terms are used to describe the sequence relationships between two or more polynucleotides or polypeptides: (a) “reference sequence”, (b) “comparison window”, (c) “sequence identity”, and, (d) “percentage of sequence identity.”

[0064] (a) As used herein, “reference sequence” is a defined sequence used as a basis for sequence comparison. A reference sequence may be a subset or the entirety of a specified sequence; for example, as a segment of a full-length cDNA or gene sequence, or the complete cDNA or gene sequence.

[0065] (b) As used herein, “comparison window” makes reference to a contiguous and specified segment of a polynucleotide sequence, wherein the polynucleotide sequence in the comparison window may comprise additions or deletions (i.e., gaps) compared to the reference sequence (which does not comprise additions or deletions) for optimal alignment of the two polynucleotides. Generally, the comparison window is at least 20 contiguous nucleotides in length, and optionally can be 30, 40, 50, 100, or longer. Those of skill in the art understand that to avoid a high similarity to a reference sequence due to inclusion of gaps in the polynucleotide sequence a gap penalty is typically introduced and is subtracted from the number of matches.

[0066] Unless otherwise stated, sequence identity/similarity values provided herein refer to the value obtained using GAP Version 10 using the following parameters: % identity and % similarity for a nucleotide sequence using GAP Weight of 50 and Length Weight of 3, and the nwsgapdna.cmp scoring matrix; % identity and % similarity for an amino acid sequence using GAP Weight of 8 and Length Weight of 2, and the BLOSUM62 scoring matrix; or any equivalent program thereof. By “equivalent program” is intended any sequence comparison program that, for any two sequences in question, generates an alignment having identical nucleotide or amino acid residue matches and an identical percent sequence identity when compared to the corresponding alignment generated by GAP Version 10.

[0067] (c) As used herein, “sequence identity” or “identity” in the context of two polynucleotides or polypeptide sequences makes reference to the residues in the two sequences that are the same when aligned for maximum correspondence over a specified comparison window. When percentage of sequence identity is used in reference to proteins it is recognized that residue positions which are not identical often differ by conservative amino acid substitutions, where amino acid residues are substituted for other amino acid residues with similar chemical properties (e.g., charge or hydrophobicity) and therefore do not change the functional properties of the molecule. When sequences differ in conservative substitutions, the percent sequence identity may be adjusted upwards to correct for the conservative nature of the substitution. Sequences that differ by such conservative substitutions are said to have “sequence similarity” or “similarity”. Means for making this adjustment are well known to those of skill in the art. Typically this involves scoring a conservative substitution as a partial rather than a full mismatch, thereby increasing the percentage sequence identity. Thus, for example, where an identical amino acid is given a score of 1 and a non-conservative substitution is given a score of zero, a conservative substitution is given a score between zero and 1. The scoring of conservative substitutions is calculated, e.g., as implemented in the program PC/GENE (Intelligenetics, Mountain View, Calif.).

[0068] (d) As used herein, “percentage of sequence identity” means the value determined by comparing two optimally aligned sequences over a comparison window, wherein the portion of the polynucleotide sequence in the comparison window may comprise additions or deletions (i.e., gaps) as compared to the reference sequence (which does not comprise additions or deletions) for optimal alignment of the two sequences. The percentage is calculated by determining the number of positions at which the identical nucleic acid base or amino acid residue occurs in both sequences to yield the number of matched positions, dividing the number of matched positions by the total number of positions in the window of comparison, and multiplying the result by 100 to yield the percentage of sequence identity.

[0069] A method is further provided for identifying a silencing element from the target polynucleotides set forth in SEQ ID NOS: 1, 4, 5, 8, 9, 12, 13, 16, 17, 20, 21, 24, 25, 28, 29, 32, 33, 36, 37, 40, 41, 44, 45, 48, 49, 52, 53, 54, 55, 56, 57, 60, 61, 64, 65, 68, 69, 72, 73, 76, 77, 80, 81, 84, 85, 88, 89, 92, 93, 96, 97, 100, 101, 104, 105, 108, 109, 112, 113, 116, 117, 120, 121, 124, 125, 128, 129, 132, 133, 136, 137, 140, 141, 144, 145, 148, 149, 152, 153, 156, 157, 160, 161, 164, 165, 168, 169, 172, 173, 176, 177, 180, 181, 184, 185, 188, 189, 192, 193, 196, 197, 200, 201, 204, 205, 208, 209, 212, 213, 216, 217, 220, 221, 224, 225, 228, 229, 232, 233, 236, 237, 240, 241, 244, 245, 248, 249, 252, 253, 256, 257, 260, 261, 264, 265, 268, 269, 272, 273, 276, 277, 280, 281, 284, 285, 288, 289, 292, 293, 296, 297, 300, 301, 304, 305, 308, 309, 312, 313, 316, 317, 320, 321, 324, 325, 328, 329, 332, 333, 336, 337, 340, 341, 344, 345, 348, 349, 352, 353, 356, 357, 360, 361, 364, 365, 368, 369, 372, 373, 376, 377, 380, 381, 384, 385, 388, 389, 392, 393, 396, 397, 400, 401, 404, 405, 408, 409, 412, 413, 416, 417, 420, 421, 424, 425, 428, 429, 432, 433, 436, 437, 440, 441, 444, 445, 448, 449, 452, 453, 456, 457, 460, 461, 464, 465, 468, 469, 472, 473, 476, 477, 480, 481, 484, 485, 488, 489, 492, 493, 496, 497, 500, 501, 504, 505, 508, 509, 512, 513, 516, 517, 520, 521, 524, 525, 528, 529, 532, 533, 536, 537, 540, 541, 544, 545, 548, 549, 552, 553, 556, 557, 560, 561, 562, 563, 564, 565, 566, 567, 568, 569, 570, 571, 572, 573, 574, 575, 576, 577, 578, 579, 580, 581, 582, 583, 584, 585, 586, 587, 588, 589, 590, 591, 592, 593, 594, 595, 596, 597, 598, 599, 600, 601, 602, 603, 604, 605, 606, 607, 608, 609, 610, 611, 612, 613, 614, 615, 616, 617, 618, 619, 620, 621, 622, 623, 624, 625, 626, 627, 628, 629, 630, 631, 632, 633, 634, 635, 636, 637, 638, 639, 640, 641, 642, 643, 644, 645, 646, 647, 648, 649, 650, 651, 652, 653, 654, 655, 656, 657, 658, 659, 660, 661, 662, 663, 664, 665, 666, 667, 668, 669, 670, 671, 672, 673, 674, 675, 676, 677, 678, 679, 680, 681, 682, 683, 684, 685, 686, 687, 688, 689, 690, 691, 692, 693, 694, 695, 696, 697, 700, 701, 702, 703, 706, 707, 708, 709, 712, 713, 714, 715, 718, 719, 720, 721, 724, 725, 726, 727, 728, or active variants and fragments thereof, and complements thereof, including, for example, SEQ ID NOS: 1, 9, 37, 45, 49, 61, 65, 77, 101, 113, 137, 141, 145, 149, 153, 157, 169, 173, 181, 185, 189, 205, 217, 225, 233, 561, 562, 563, 564, 565, 566, 567, 568, 569, 570, 571, 572, 573, 574, 575, 576, 577, 578, 579, 580, 581, 582, 583, 584, 585, 586, 587, 588, 589, 590, 591, 592, 593, 594, 595, 596, 597, 598, 599, 600, 601, 602, 603, 604, 605, 606, 607, 608, 609, 610, 611, 612, 613, 614, 615, 616, 617, 618, 619, 620, 621, 622, 623, 624, 625, 626, 627, 628, 629, 630, 631, 632, 633, 634, 635, 636, 637, 638, 639, 640, 641, 642, 643, 644, 645, 646, 647, 648, 649, 650, 651, 652, 653, 654, 655, 656, 657, 658, 659, 660, 661, 662, 663, 664, 665, 666, 667, 668, 669, 670, 671, 672, 673, 674, 675, 676, 677, 678, 679, 680, 681, 682, 683, 684, 685, 686, 687, 688, 689, 690, 691, 692, and active variants and fragments thereof, and complements thereof, and SEQ ID NOS: 4, 140, 144, 148, 693, 694, 695, 696, 697, 700, 701, 702, 703, 706, 707, 708, 709, 712, 713, 714, 715, 718, 719, 720, 721, 724, 725, 726, 727, 728, and active variants and fragments thereof, and complements thereof. Such methods comprise obtaining a candidate fragment of any one of SEQ ID NOS: 1, 4, 5, 8, 9, 12, 13, 16, 17, 20, 21, 24, 25, 28, 29, 32, 33, 36, 37, 40, 41, 44, 45, 48, 49, 52, 53, 54, 55, 56, 57, 60, 61, 64, 65, 68, 69, 72, 73, 76, 77, 80, 81, 84, 85, 88, 89, 92, 93, 96, 97, 100, 101, 104, 105, 108, 109, 112, 113, 116, 117, 120, 121, 124, 125, 128, 129, 132, 133, 136, 137, 140, 141, 144, 145, 148, 149, 152, 153, 156, 157, 160, 161, 164, 165, 168, 169, 172, 173, 176, 177, 180, 181, 184, 185, 188, 189, 192, 193, 196, 197, 200, 201, 204, 205, 208, 209, 212, 213, 216, 217, 220, 221, 224, 225, 228, 229, 232, 233, 236, 237, 240, 241, 244, 245, 248, 249, 252, 253, 256, 257, 260, 261, 264, 265, 268, 269, 272, 273, 276, 277, 280, 281, 284, 285, 288, 289, 292, 293, 296, 297, 300, 301, 304, 305, 308, 309, 312, 313, 316, 317, 320, 321, 324, 325, 328, 329, 332, 333, 336, 337, 340, 341, 344, 345, 348, 349, 352, 353, 356, 357, 360, 361, 364, 365, 368, 369, 372, 373, 376, 377, 380, 381, 384, 385, 388, 389, 392, 393, 396, 397, 400, 401, 404, 405, 408, 409, 412, 413, 416, 417, 420, 421, 424, 425, 428, 429, 432, 433, 436, 437, 440, 441, 444, 445, 448, 449, 452, 453, 456, 457, 460, 461, 464, 465, 468, 469, 472, 473, 476, 477, 480, 481, 484, 485, 488, 489, 492, 493, 496, 497, 500, 501, 504, 505, 508, 509, 512, 513, 516, 517, 520, 521, 524, 525, 528, 529, 532, 533, 536, 537, 540, 541, 544, 545, 548, 549, 552, 553, 556, 557, 560, 561, 562, 563, 564, 565, 566, 567, 568, 569, 570, 571, 572, 573, 574, 575, 576, 577, 578, 579, 580, 581, 582, 583, 584, 585, 586, 587, 588, 589, 590, 591, 592, 593, 594, 595, 596, 597, 598, 599, 600, 601, 602, 603, 604, 605, 606, 607, 608, 609, 610, 611, 612, 613, 614, 615, 616, 617, 618, 619, 620, 621, 622, 623, 624, 625, 626, 627, 628, 629, 630, 631, 632, 633, 634, 635, 636, 637, 638, 639, 640, 641, 642, 643, 644, 645, 646, 647, 648, 649, 650, 651, 652, 653, 654, 655, 656, 657, 658, 659, 660, 661, 662, 663, 664, 665, 666, 667, 668, 669, 670, 671, 672, 673, 674, 675, 676, 677, 678, 679, 680, 681, 682, 683, 684, 685, 686, 687, 688, 689, 690, 691, 692, 693, 694, 695, 696, 697, 700, 701, 702, 703, 706, 707, 708, 709, 712, 713, 714, 715, 718, 719, 720, 721, 724, 725, 726, 727, 728, or active variants and fragments thereof, and complements thereof, including, for example, SEQ ID NOS: 1, 9, 37, 45, 49, 61, 65, 77, 101, 113, 137, 141, 145, 149, 153, 157, 169, 173, 181, 185, 189, 205, 217, 225, 233, 561, 562, 563, 564, 565, 566, 567, 568, 569, 570, 571, 572, 573, 574, 575, 576, 577, 578, 579, 580, 581, 582, 583, 584, 585, 586, 587, 588, 589, 590, 591, 592, 593, 594, 595, 596, 597, 598, 599, 600, 601, 602, 603, 604, 605, 606, 607, 608, 609, 610, 611, 612, 613, 614, 615, 616, 617, 618, 619, 620, 621, 622, 623, 624, 625, 626, 627, 628, 629, 630, 631, 632, 633, 634, 635, 636, 637, 638, 639, 640, 641, 642, 643, 644, 645, 646, 647, 648, 649, 650, 651, 652, 653, 654, 655, 656, 657, 658, 659, 660, 661, 662, 663, 664, 665, 666, 667, 668, 669, 670, 671, 672, 673, 674, 675, 676, 677, 678, 679, 680, 681, 682, 683, 684, 685, 686, 687, 688, 689, 690, 691, 692, and active variants and fragments thereof, and complements thereof, and SEQ ID NOS: 4, 140, 144, 148, 693, 694, 695, 696, 697, 700, 701, 702, 703, 706, 707, 708, 709, 712, 713, 714, 715, 718, 719, 720, 721, 724, 725, 726, 727, 728, and active variants and fragments thereof, and complements thereof, which is of sufficient length to act as a silencing element and thereby reduce the expression of the target polynucleotide and/or control a desired pest; expressing said candidate polynucleotide fragment in an appropriate expression cassette to produce a candidate silencing element and determining is said candidate polynucleotide fragment has the activity of a silencing element and thereby reduce the expression of the target polynucleotide and/or controls a desired pest. Methods of identifying such candidate fragments based on the desired pathway for suppression are known. For example, various bioinformatics programs can be employed to identify the region of the target polynucleotides that could be exploited to generate a silencing element. See, for example, Elbahir et al. (2001) Genes and Development 15:188-200, Schwartz et al. (2003) Cell 115:199-208, Khvorova et al. (2003) Cell 115:209-216. See also, siRNA at Whitehead (jura.wi.mit.edu/bioc/siRNAext/) which calculates the binding energies for both sense and antisense siRNAs. See, also genscript.com/ssl-bin/app/rnai?op=known; Block-iT™ RNAi designer from Invitrogen and GenScript siRNA Construct Builder.

### V. DNA Constructs

[0070] The use of the term “polynucleotide” is not intended to limit the present invention to polynucleotides comprising DNA. Those of ordinary skill in the art will recognize that polynucleotides can comprise ribonucleotides and combinations of ribonucleotides and deoxyribonucleotides. Such deoxyribonucleotides and ribonucleotides include both naturally occurring molecules and synthetic analogues. The polynucleotides of the invention also encompass all forms of sequences including, but not limited to, single-stranded forms, double-stranded forms, hairpins, stem-and-loop structures, and the like.

[0071] The polynucleotide encoding the silencing element or in specific embodiments employed in the methods and compositions of the invention can be provided in expression cassettes for expression in a plant or organism of interest. It is recognized that multiple silencing elements including multiple identical silencing elements, multiple silencing elements targeting different regions of the target sequence, or multiple silencing elements from different target sequences can be used. In this embodiment, it is recognized that each silencing element can be contained in a single or separate cassette, DNA construct, or vector. As discussed, any means of providing the silencing element is contemplated. A plant or plant cell can be transformed with a single cassette comprising DNA encoding one or more silencing elements or separate cassettes comprising each silencing element can be used to transform a plant or plant cell or host cell. Likewise, a plant transformed with one component can be subsequently transformed with the second component. One or more silencing elements can also be brought together by sexual crossing. That is, a first plant comprising one component is crossed with a second plant comprising the second component. Progeny plants from the cross will comprise both components.

[0072] The expression cassette can include 5′ and 3′ regulatory sequences operably linked to the polynucleotide of the invention. “Operably linked” is intended to mean a functional linkage between two or more elements. For example, an operable linkage between a polynucleotide of the invention and a regulatory sequence (i.e., a promoter) is a functional link that allows for expression of the polynucleotide of the invention. Operably linked elements may be contiguous or non-contiguous. When used to refer to the joining of two protein coding regions, by operably linked is intended that the coding regions are in the same reading frame. The cassette may additionally contain at least one additional polynucleotide to be cotransformed into the organism. Alternatively, the additional polypeptide(s) can be provided on multiple expression cassettes. Expression cassettes can be provided with a plurality of restriction sites and/or recombination sites for insertion of the polynucleotide to be under the transcriptional regulation of the regulatory regions. The expression cassette may additionally contain selectable marker genes.

[0073] The expression cassette can include in the 5′-3′ direction of transcription, a transcriptional and translational initiation region (i.e., a promoter), a polynucleotide comprising the silencing element employed in the methods and compositions of the invention, and a transcriptional and translational termination region (i.e., termination region) functional in plants. In other embodiment, the double stranded RNA is expressed from a suppression cassette. Such a cassette can comprise two convergent promoters that drive transcription of an operably linked silencing element. “Convergent promoters” refers to promoters that are oriented on either terminus of the operably linked silencing element such that each promoter drives transcription of the silencing element in opposite directions, yielding two transcripts. In such embodiments, the convergent promoters allow for the transcription of the sense and anti-sense strand and thus allow for the formation of a dsRNA. Such a cassette may also comprise two divergent promoters that drive transcription of one or more operably linked silencing elements. “Divergent promoters” refers to promoters that are oriented in opposite directions of each other, driving transcription of the one or more silencing elements in opposite directions. In such embodiments, the divergent promoters allow for the transcription of the sense and antisense strands and allow for the formation of a dsRNA. In such embodiments, the divergent promoters also allow for the transcription of at least two separate hairpin RNAs. In another embodiment, one cassette comprising two or more silencing elements under the control of two separate promoters in the same orientation is present in a construct. In another embodiment, two or more individual cassettes, each comprising at least one silencing element under the control of a promoter, are present in a construct in the same orientation.

[0074] The regulatory regions (i.e., promoters, transcriptional regulatory regions, and translational termination regions) and/or the polynucleotides employed in the invention may be native/analogous to the host cell or to each other. Alternatively, the regulatory regions and/or the polynucleotide employed in the invention may be heterologous to the host cell or to each other. As used herein, “heterologous” in reference to a sequence is a sequence that originates from a foreign species, or, if from the same species, is substantially modified from its native form in composition and/or genomic locus by deliberate human intervention. For example, a promoter operably linked to a heterologous polynucleotide is from a species different from the species from which the polynucleotide was derived, or, if from the same/analogous species, one or both are substantially modified from their original form and/or genomic locus, or the promoter is not the native promoter for the operably linked polynucleotide. As used herein, a chimeric gene comprises a coding sequence operably linked to a transcription initiation region that is heterologous to the coding sequence.

[0075] The termination region may be native with the transcriptional initiation region, may be native with the operably linked polynucleotide encoding the silencing element, may be native with the plant host, or may be derived from another source (i.e., foreign or heterologous) to the promoter, the polynucleotide comprising silencing element, the plant host, or any combination thereof. Convenient termination regions are available from the Ti-plasmid of A. tumefaciens, such as the octopine synthase and nopaline synthase termination regions. See also Guerineau et al. (1991) Mol. Gen. Genet. 262:141-144; Proudfoot (1991) Cell 64:671-674; Sanfacon et al. (1991) Genes Dev. 5:141-149; Mogen et al. (1990) Plant Cell 2:1261-1272; Munroe et al. (1990) Gene 91:151-158; Ballas et al. (1989) Nucleic Acids Res. 17:7891-7903; and Joshi et al. (1987) Nucleic Acids Res. 15:9627-9639.

[0076] Additional sequence modifications are known to enhance gene expression in a cellular host. These include elimination of sequences encoding spurious polyadenylation signals, exon-intron splice site signals, transposon-like repeats, and other such well-characterized sequences that may be deleterious to gene expression. The G-C content of the sequence may be adjusted to levels average for a given cellular host, as calculated by reference to known genes expressed in the host cell. When possible, the sequence is modified to avoid predicted hairpin secondary mRNA structures.

[0077] In preparing the expression cassette, the various DNA fragments may be manipulated, so as to provide for the DNA sequences in the proper orientation and, as appropriate, in the proper reading frame. Toward this end, adapters or linkers may be employed to join the DNA fragments or other manipulations may be involved to provide for convenient restriction sites, removal of superfluous DNA, removal of restriction sites, or the like. For this purpose, in vitro mutagenesis, primer repair, restriction, annealing, resubstitutions, e.g., transitions and transversions, may be involved.

[0078] A number of promoters can be used in the practice of the invention. The polynucleotide encoding the silencing element can be combined with constitutive, tissue-preferred, or other promoters for expression in plants.

[0079] Such constitutive promoters include, for example, the core promoter of the Rsyn7 promoter and other constitutive promoters disclosed in WO 99/43838 and U.S. Pat. No. 6,072,050; the core CaMV 35S promoter (Odell et al. (1985) Nature 313:810-812); rice actin (McElroy et al. (1990) Plant Cell 2:163-171); ubiquitin (Christensen et al. (1989) Plant Mol. Biol. 12:619-632 and Christensen et al. (1992) Plant Mol. Biol. 18:675-689); pEMU (Last et al. (1991) Theor. Appl. Genet. 81:581-588); MAS (Velten et al. (1984) EMBO J. 3:2723-2730); ALS promoter (U.S. Pat. No. 5,659,026), and the like. Other constitutive promoters include, for example, U.S. Pat. Nos. 5,608,149; 5,608,144; 5,604,121; 5,569,597; 5,466,785; 5,399,680; 5,268,463; 5,608,142; and 6,177,611.

[0080] An inducible promoter, for instance, a pathogen-inducible promoter could also be employed. Such promoters include those from pathogenesis-related proteins (PR proteins), which are induced following infection by a pathogen; e.g., PR proteins, SAR proteins, beta-1,3-glucanase, chitinase, etc. See, for example, Redolfi et al. (1983) Neth. J. Plant Pathol. 89:245-254; Uknes et al. (1992) Plant Cell 4:645-656; and Van Loon (1985) Plant Mol. Virol. 4:111-116. See also WO 99/43819, herein incorporated by reference.

[0081] Additionally, as pathogens find entry into plants through wounds or insect damage, a wound-inducible promoter may be used in the constructions of the invention. Such wound-inducible promoters include potato proteinase inhibitor (pin II) gene (Ryan (1990) Ann. Rev. Phytopath. 28:425-449; Duan et al. (1996) Nature Biotechnology 14:494-498); wun1 and wun2, U.S. Pat. No. 5,428,148; win1 and win2 (Stanford et al. (1989) Mol. Gen. Genet. 215:200-208); systemin (McGurl et al. (1992) Science 225:1570-1573); WIP1 (Rohmeier et al. (1993) Plant Mol. Biol. 22:783-792; Eckelkamp et al. (1993) FEBS Letters 323:73-76); MPI gene (Corderok et al. (1994) Plant J. 6(2):141-150); and the like, herein incorporated by reference.

[0082] Chemical-regulated promoters can be used to modulate the expression of a gene in a plant through the application of an exogenous chemical regulator. Depending upon the objective, the promoter may be a chemical-inducible promoter, where application of the chemical induces gene expression, or a chemical-repressible promoter, where application of the chemical represses gene expression. Chemical-inducible promoters are known in the art and include, but are not limited to, the maize In2-2 promoter, which is activated by benzenesulfonamide herbicide safeners, the maize GST promoter, which is activated by hydrophobic electrophilic compounds that are used as pre-emergent herbicides, and the tobacco PR-1a promoter, which is activated by salicylic acid. Other chemical-regulated promoters of interest include steroid-responsive promoters (see, for example, the glucocorticoid-inducible promoter in Schena et al. (1991) Proc. Natl. Acad. Sci. USA 88:10421-10425 and McNellis et al. (1998) Plant J. 14(2):247-257) and tetracycline-inducible and tetracycline-repressible promoters (see, for example, Gatz et al. (1991) Mol. Gen. Genet. 227:229-237, and U.S. Pat. Nos. 5,814,618 and 5,789,156), herein incorporated by reference.

[0083] Tissue-preferred promoters can be utilized to target enhanced expression within a particular plant tissue. Tissue-preferred promoters include Yamamoto et al. (1997) Plant J. 12(2):255-265; Kawamata et al. (1997) Plant Cell Physiol. 38(7):792-803; Hansen et al. (1997) Mol. Gen Genet. 254(3):337-343; Russell et al. (1997) Transgenic Res. 6(2):157-168; Rinehart et al. (1996) Plant Physiol. 112(3):1331-1341; Van Camp et al. (1996) Plant Physiol. 112(2):525-535; Canevascini et al. (1996) Plant Physiol. 112(2):513-524; Yamamoto et al. (1994) Plant Cell Physiol. 35(5):773-778; Lam (1994) Results Probl. Cell Differ. 20:181-196; Orozco et al. (1993) Plant Mol Biol. 23(6):1129-1138; Matsuoka et al. (1993) Proc Natl. Acad. Sci. USA 90(20):9586-9590; and Guevara-Garcia et al. (1993) Plant J. 4(3):495-505. Such promoters can be modified, if necessary, for weak expression.

[0084] Leaf-preferred promoters are known in the art. See, for example, Yamamoto et al. (1997) Plant J. 12(2):255-265; Kwon et al. (1994) Plant Physiol. 105:357-67; Yamamoto et al. (1994) Plant Cell Physiol. 35(5):773-778; Gotor et al. (1993) Plant J. 3:509-18; Orozco et al. (1993) Plant Mol. Biol. 23(6):1129-1138; and Matsuoka et al. (1993) Proc. Natl. Acad. Sci. USA 90(20):9586-9590.

[0085] Root-preferred promoters are known and can be selected from the many available from the literature or isolated de novo from various compatible species. See, for example, Hire et al. (1992) Plant Mol. Biol. 20(2):207-218 (soybean root-specific glutamine synthetase gene); Keller and Baumgartner (1991) Plant Cell 3(10):1051-1061 (root-specific control element in the GRP 1.8 gene of French bean); Sanger et al. (1990) Plant Mol. Biol. 14(3):433-443 (root-specific promoter of the mannopine synthase (MAS) gene of Agrobacterium tumefaciens); and Miao et al. (1991) Plant Cell 3(1):11-22 (full-length cDNA clone encoding cytosolic glutamine synthetase (GS), which is expressed in roots and root nodules of soybean). See also Bogusz et al. (1990) Plant Cell 2(7):633-641, where two root-specific promoters isolated from hemoglobin genes from the nitrogen-fixing nonlegume Parasponia andersonii and the related non-nitrogen-fixing nonlegume Trema tomentosa are described. The promoters of these genes were linked to a β-glucuronidase reporter gene and introduced into both the nonlegume Nicotiana tabacum and the legume Lotus corniculatus, and in both instances root-specific promoter activity was preserved. Leach and Aoyagi (1991) describe their analysis of the promoters of the highly expressed rolC and rolD root-inducing genes of Agrobacterium rhizogenes (see Plant Science (Limerick) 79(1):69-76). They concluded that enhancer and tissue-preferred DNA determinants are dissociated in those promoters. Teeri et al. (1989) used gene fusion to lacZ to show that the Agrobacterium T-DNA gene encoding octopine synthase is especially active in the epidermis of the root tip and that the TR2′ gene is root specific in the intact plant and stimulated by wounding in leaf tissue, an especially desirable combination of characteristics for use with an insecticidal or larvicidal gene (see EMBO J. 8(2):343-350). The TR1′ gene, fused to nptII (neomycin phosphotransferase II) showed similar characteristics. Additional root-preferred promoters include the VfENOD-GRP3 gene promoter (Kuster et al. (1995) Plant Mol. Biol. 29(4):759-772); and rolB promoter (Capana et al. (1994) Plant Mol. Biol. 25(4):681-691. See also U.S. Pat. Nos. 5,837,876; 5,750,386; 5,633,363; 5,459,252; 5,401,836; 5,110,732; and 5,023,179.

[0086] In one embodiment of this invention the plant-expressed promoter is a vascular-specific promoter such as a phloem-specific promoter. A “vascular-specific” promoter, as used herein, is a promoter which is at least expressed in vascular cells, or a promoter which is preferentially expressed in vascular cells. Expression of a vascular-specific promoter need not be exclusively in vascular cells, expression in other cell types or tissues is possible. A “phloem-specific promoter” as used herein, is a plant-expressible promoter which is at least expressed in phloem cells, or a promoter which is preferentially expressed in phloem cells.

[0087] Expression of a phloem-specific promoter need not be exclusively in phloem cells, expression in other cell types or tissues, e.g., xylem tissue, is possible. In one embodiment of this invention, a phloem-specific promoter is a plant-expressible promoter at least expressed in phloem cells, wherein the expression in non-phloem cells is more limited (or absent) compared to the expression in phloem cells. Examples of suitable vascular-specific or phloem-specific promoters in accordance with this invention include but are not limited to the promoters selected from the group consisting of: the SCSV3, SCSV4, SCSV5, and SCSV7 promoters (Schunmann et al. (2003) Plant Functional Biology 30:453-60; the rolC gene promoter of Agrobacterium rhizogenes(Kiyokawa et al. (1994) Plant Physiology 104:801-02; Pandolfini et al. (2003) BioMedCentral (BMC) Biotechnology 3:7, (www.biomedcentral.com/1472-6750/3/7); Graham et al. (1997) Plant Mol. Biol. 33:729-35; Guivarc'h et al. (1996); Almon et al. (1997) Plant Physiol. 115:1599-607; the rolA gene promoter of Agrobacterium rhizogenes (Dehio et al. (1993) Plant Mol. Biol. 23:1199-210); the promoter of the Agrobacterium tumefaciens T-DNA gene 5 (Korber et al. (1991) EMBO J. 10:3983-91); the rice sucrose synthase RSs1 gene promoter (Shi et al. (1994) J. Exp. Bot. 45:623-31); the CoYMV or Commelina yellow mottle badnavirus promoter (Medberry et al. (1992) Plant Cell 4:185-92; Zhou et al. (1998) Chin. J. Biotechnol. 14:9-16); the CFDV or coconut foliar decay virus promoter (Rohde et al. (1994) Plant Mol. Biol. 27:623-28; Hehn and Rhode (1998) J. Gen. Virol. 79:1495-99); the RTBV or rice tungro bacilliform virus promoter (Yin and Beachy (1995) Plant J. 7:969-80; Yin et al. (1997) Plant J. 12:1179-80); the pea glutamin synthase GS3A gene (Edwards et al. (1990) Proc. Natl. Acad. Sci. USA 87:3459-63; Brears et al. (1991) Plant J. 1:235-44); the inv CD111 and inv CD141 promoters of the potato invertase genes (Hedley et al. (2000) J. Exp. Botany 51:817-21); the promoter isolated from Arabidopsis shown to have phloem-specific expression in tobacco by Kertbundit et al. (1991) Proc. Natl. Acad. Sci. USA 88:5212-16); the VAHOX1 promoter region (Tornero et al. (1996) Plant J. 9:639-48); the pea cell wall invertase gene promoter (Zhang et al. (1996) Plant Physiol. 112:1111-17); the promoter of the endogenous cotton protein related to chitinase of US published patent application 20030106097, an acid invertase gene promoter from carrot (Ramloch-Lorenz et al. (1993) The Plant J. 4:545-54); the promoter of the sulfate transporter geneSultr1; 3 (Yoshimoto et al. (2003) Plant Physiol. 131:1511-17); a promoter of a sucrose synthase gene (Nolte and Koch (1993) Plant Physiol. 101:899-905); and the promoter of a tobacco sucrose transporter gene (Kuhn et al. (1997) Science 275-1298-1300).

[0088] Possible promoters also include the Black Cherry promoter for Prunasin Hydrolase (PH DL1.4 PRO) (U.S. Pat. No. 6,797,859), Thioredoxin H promoter from cucumber and rice (Fukuda A et al. (2005). Plant Cell Physiol. 46(11):1779-86), Rice (RSs1) (Shi, T. Wang et al. (1994). J. Exp. Bot. 45(274): 623-631) and maize sucrose synthese-1 promoters (Yang., N-S. et al. (1990) PNAS 87:4144-4148), PP2 promoter from pumpkin Guo, H. et al. (2004) Transgenic Research 13:559-566), At SUC2 promoter (Truernit, E. et al. (1995) Planta 196(3):564-70, At SAM-1 (S-adenosylmethionine synthetase) (Mijnsbrugge K V. et al. (1996) Planr. Cell. Physiol. 37(8): 1108-1115), and the Rice tungro bacilliform virus (RTBV) promoter (Bhattacharyya-Pakrasi et al. (1993) Plant J. 4(1):71-79).

[0089] The expression cassette can also comprise a selectable marker gene for the selection of transformed cells. Selectable marker genes are utilized for the selection of transformed cells or tissues. Marker genes include genes encoding antibiotic resistance, such as those encoding neomycin phosphotransferase II (NEO) and hygromycin phosphotransferase (HPT), as well as genes conferring resistance to herbicidal compounds, such as glufosinate ammonium, bromoxynil, imidazolinones, and 2,4-dichlorophenoxyacetate (2,4-D). Additional selectable markers include phenotypic markers such as β-galactosidase and fluorescent proteins such as green fluorescent protein (GFP) (Su et al. (2004) Biotechnol Bioeng 85:610-9 and Fetter et al. (2004) Plant Cell 16:215-28), cyan florescent protein (CYP) (Bolte et al. (2004) J. Cell Science 117:943-54 and Kato et al. (2002) Plant Physiol 129:913-42), and yellow florescent protein (PhiYFP™ from Evrogen, see, Bolte et al. (2004) J. Cell Science 117:943-54). For additional selectable markers, see generally, Yarranton (1992) Curr. Opin. Biotech. 3:506-511; Christopherson et al. (1992) Proc. Natl. Acad. Sci. USA 89:6314-6318; Yao et al. (1992) Cell 71:63-72; Reznikoff (1992) Mol. Microbiol. 6:2419-2422; Barkley et al. (1980) in The Operon, pp. 177-220; Hu et al. (1987) Cell 48:555-566; Brown et al. (1987) Cell 49:603-612; Figge et al. (1988) Cell 52:713-722; Deuschle et al. (1989) Proc. Natl. Acad. Sci. USA 86:5400-5404; Fuerst et al. (1989) Proc. Natl. Acad. Sci. USA 86:2549-2553; Deuschle et al. (1990) Science 248:480-483; Gossen (1993) Ph.D. Thesis, University of Heidelberg; Reines et al. (1993) Proc. Natl. Acad. Sci. USA 90:1917-1921; Labow et al. (1990) Mol. Cell. Biol. 10:3343-3356; Zambretti et al. (1992) Proc. Natl. Acad. Sci. USA 89:3952-3956; Baim et al. (1991) Proc. Natl. Acad. Sci. USA 88:5072-5076; Wyborski et al. (1991) Nucleic Acids Res. 19:4647-4653; Hillenand-Wissman (1989) Topics Mol. Struc. Biol. 10:143-162; Degenkolb et al. (1991) Antimicrob. Agents Chemother. 35:1591-1595; Kleinschnidt et al. (1988) Biochemistry 27:1094-1104; Bonin (1993) Ph.D. Thesis, University of Heidelberg; Gossen et al. (1992) Proc. Natl. Acad. Sci. USA 89:5547-5551; Oliva et al. (1992) Antimicrob. Agents Chemother. 36:913-919; Hlavka et al. (1985) Handbook of Experimental Pharmacology, Vol. 78 (Springer-Verlag, Berlin); Gill et al. (1988) Nature 334:721-724. Such disclosures are herein incorporated by reference. The above list of selectable marker genes is not meant to be limiting. Any selectable marker gene can be used in the present invention.

### VI. Compositions Comprising Silencing Elements

[0090] One or more of the polynucleotides comprising the silencing element can be provided as an external composition such as a spray or powder to the plant, plant part, seed, a pest, or an area of cultivation. In another example, a plant is transformed with a DNA construct or expression cassette for expression of at least one silencing element. In either composition, the silencing element, when ingested by an insect, can reduce the level of a target pest sequence and thereby control the pest (i.e., a Coleopteran plant pest including a Diabrotica plant pest, such as, D. virgifera virgifera, D. barberi, D. virgifera zeae, D. speciosa, or D. undecimpunctata howardi). It is recognized that the composition can comprise a cell (such as plant cell or a bacterial cell), in which a polynucleotide encoding the silencing element is stably incorporated into the genome and operably linked to promoters active in the cell. Compositions comprising a mixture of cells, some cells expressing at least one silencing element are also encompassed. In other embodiments, compositions comprising the silencing elements are not contained in a cell. In such embodiments, the composition can be applied to an area inhabited by a pest. In one embodiment, the composition is applied externally to a plant (i.e., by spraying a field or area of cultivation) to protect the plant from the pest. Methods of applying nucleotides in such a manner are known to those of skill in the art.

[0091] The composition of the invention can further be formulated as bait. In this embodiment, the compositions comprise a food substance or an attractant which enhances the attractiveness of the composition to the pest.

[0092] The composition comprising the silencing element can be formulated in an agriculturally suitable and/or environmentally acceptable carrier. Such carriers can be any material that the animal, plant or environment to be treated can tolerate. Furthermore, the carrier must be such that the composition remains effective at controlling a pest. Examples of such carriers include water, saline, Ringer's solution, dextrose or other sugar solutions, Hank's solution, and other aqueous physiologically balanced salt solutions, phosphate buffer, bicarbonate buffer and Tris buffer. In addition, the composition may include compounds that increase the half-life of a composition. Various insecticidal formulations can also be found in, for example, US Publications 2008/0275115, 2008/0242174, 2008/0027143, 2005/0042245, and 2004/0127520, each of which is herein incorporated by reference.

[0093] It is recognized that the polynucleotides comprising sequences encoding the silencing element can be used to transform organisms to provide for host organism production of these components, and subsequent application of the host organism to the environment of the target pest(s). Such host organisms include baculoviruses, bacteria, and the like. In this manner, the combination of polynucleotides encoding the silencing element may be introduced via a suitable vector into a microbial host, and said host applied to the environment, or to plants or animals.

[0094] The term “introduced” in the context of inserting a nucleic acid into a cell, means “transfection” or “transformation” or “transduction” and includes reference to the incorporation of a nucleic acid into a eukaryotic or prokaryotic cell where the nucleic acid may be stably incorporated into the genome of the cell (e.g., chromosome, plasmid, plastid, or mitochondrial DNA), converted into an autonomous replicon, or transiently expressed (e.g., transfected mRNA).

[0095] Microbial hosts that are known to occupy the “phytosphere” (phylloplane, phyllosphere, rhizosphere, and/or rhizoplana) of one or more crops of interest may be selected. These microorganisms are selected so as to be capable of successfully competing in the particular environment with the wild-type microorganisms, provide for stable maintenance and expression of the sequences encoding the silencing element, and desirably, provide for improved protection of the components from environmental degradation and inactivation.

[0096] Such microorganisms include bacteria, algae, and fungi. Of particular interest are microorganisms such as bacteria, e.g., Pseudomonas, Erwinia, Serratia, Klebsiella, Xanthomonas, Streptomyces, Rhizobium, Rhodopseudomonas, Methylius, Agrobacterium, Acetobacter, Lactobacillus, Arthrobacter, Azotobacter, Leuconostoc, and Alcaligenes, fungi, particularly yeast, e.g., Saccharomyces, Cryptococcus, Kluyveromyces, Sporobolomyces, Rhodotorula, and Aureobasidium. Of particular interest are such phytosphere bacterial species as Pseudomonas syringae, Pseudomonas fluorescens, Serratia marcescens, Acetobacter xylinum, Agrobacteria, Rhodopseudomonas spheroides, Xanthomonas campestris, Rhizobium melioti, Alcaligenes entrophus, Clavibacter xyli and Azotobacter vinlandir, and phytosphere yeast species such as Rhodotorula rubra, R. glutinis, R. marina, R. aurantiaca, Cryptococcus albidus, C. diffluens, C. laurentii, Saccharomyces rosei, S. pretoriensis, S. cerevisiae, Sporobolomyces rosues, S. odorus, Kluyveromyces veronae, and Aureobasidium pollulans. Of particular interest are the pigmented microorganisms.

[0097] A number of ways are available for introducing the polynucleotide comprising the silencing element into the microbial host under conditions that allow for stable maintenance and expression of such nucleotide encoding sequences. For example, expression cassettes can be constructed which include the nucleotide constructs of interest operably linked with the transcriptional and translational regulatory signals for expression of the nucleotide constructs, and a nucleotide sequence homologous with a sequence in the host organism, whereby integration will occur, and/or a replication system that is functional in the host, whereby integration or stable maintenance will occur.

[0098] Transcriptional and translational regulatory signals include, but are not limited to, promoters, transcriptional initiation start sites, operators, activators, enhancers, other regulatory elements, ribosomal binding sites, an initiation codon, termination signals, and the like. See, for example, U.S. Pat. Nos. 5,039,523 and 4,853,331; EPO 0480762A2; Sambrook et al. (2000); Molecular Cloning: A Laboratory Manual (3^{rd} ed.; Cold Spring Harbor Laboratory Press, Plainview, N.Y.); Davis et al. (1980) Advanced Bacterial Genetics (Cold Spring Harbor Laboratory, Cold Spring Harbor, N.Y.); and the references cited therein.

[0099] Suitable host cells include the prokaryotes and the lower eukaryotes, such as fungi. Illustrative prokaryotes, both Gram-negative and Gram-positive, include Enterobacteriaceae, such as Escherichia, Erwinia, Shigella, Salmonella, and Proteus; Bacillaceae; Rhizobiceae, such as Rhizobium; Spirillaceae, such as photobacterium, Zymomonas, Serratia, Aeromonas, Vibrio, Desulfovibrio, Spirillum; Lactobacillaceae; Pseudomonadaceae, such as Pseudomonas and Acetobacter; Azotobacteraceae and Nitrobacteraceae. Among eukaryotes are fungi, such as Phycomycetes and Ascomycetes, which includes yeast, such as Saccharomyces and Schizosaccharomyces; and Basidiomycetes yeast, such as Rhodotorula, Aureobasidium, Sporobolomyces, and the like.

[0100] Characteristics of particular interest in selecting a host cell for purposes of the invention include ease of introducing the coding sequence into the host, availability of expression systems, efficiency of expression, stability in the host, and the presence of auxiliary genetic capabilities. Characteristics of interest for use as a pesticide microcapsule include protective qualities, such as thick cell walls, pigmentation, and intracellular packaging or formation of inclusion bodies; leaf affinity; lack of mammalian toxicity; attractiveness to pests for ingestion; and the like. Other considerations include ease of formulation and handling, economics, storage stability, and the like.

[0101] Host organisms of particular interest include yeast, such as Rhodotorula spp., Aureobasidium spp., Saccharomyces spp., and Sporobolomyces spp., phylloplane organisms such as Pseudomonas spp., Erwinia spp., and Flavobacterium spp., and other such organisms, including Pseudomonas aeruginosa, Pseudomonas fluorescens, Saccharomyces cerevisiae, Bacillus thuringiensis, Escherichia coli, Bacillus subtilis, and the like.

[0102] The sequences encoding the silencing elements encompassed by the invention can be introduced into microorganisms that multiply on plants (epiphytes) to deliver these components to potential target pests. Epiphytes, for example, can be gram-positive or gram-negative bacteria.

[0103] The silencing element can be fermented in a bacterial host and the resulting bacteria processed and used as a microbial spray in the same manner that Bacillus thuringiensis strains have been used as insecticidal sprays. Any suitable microorganism can be used for this purpose. By way of example, Pseudomonas has been used to express Bacillus thuringiensis endotoxins as encapsulated proteins and the resulting cells processed and sprayed as an insecticide Gaertner et al. (1993), in Advanced Engineered Pesticides, ed. L. Kim (Marcel Decker, Inc.).

[0104] Alternatively, the components of the invention are produced by introducing heterologous genes into a cellular host. Expression of the heterologous sequences results, directly or indirectly, in the intracellular production of the silencing element. These compositions may then be formulated in accordance with conventional techniques for application to the environment hosting a target pest, e.g., soil, water, and foliage of plants. See, for example, EPA 0192319, and the references cited therein.

[0105] In the present invention, a transformed microorganism can be formulated with an acceptable carrier into separate or combined compositions that are, for example, a suspension, a solution, an emulsion, a dusting powder, a dispersible granule, a wettable powder, and an emulsifiable concentrate, an aerosol, an impregnated granule, an adjuvant, a coatable paste, and also encapsulations in, for example, polymer substances.

[0106] Such compositions disclosed above may be obtained by the addition of a surface-active agent, an inert carrier, a preservative, a humectant, a feeding stimulant, an attractant, an encapsulating agent, a binder, an emulsifier, a dye, a UV protectant, a buffer, a flow agent or fertilizers, micronutrient donors, or other preparations that influence plant growth. One or more agrochemicals including, but not limited to, herbicides, insecticides, fungicides, bactericides, nematicides, molluscicides, acaracides, plant growth regulators, harvest aids, and fertilizers, can be combined with carriers, surfactants or adjuvants customarily employed in the art of formulation or other components to facilitate product handling and application for particular target pests. Suitable carriers and adjuvants can be solid or liquid and correspond to the substances ordinarily employed in formulation technology, e.g., natural or regenerated mineral substances, solvents, dispersants, wetting agents, tackifiers, binders, or fertilizers. The active ingredients of the present invention (i.e., at least one silencing element) are normally applied in the form of compositions and can be applied to the crop area, plant, or seed to be treated. For example, the compositions may be applied to grain in preparation for or during storage in a grain bin or silo, etc. The compositions may be applied simultaneously or in succession with other compounds. Methods of applying an active ingredient or a composition that contains at least one silencing element include, but are not limited to, foliar application, seed coating, and soil application. The number of applications and the rate of application depend on the intensity of infestation by the corresponding pest.

[0107] Suitable surface-active agents include, but are not limited to, anionic compounds such as a carboxylate of, for example, a metal; carboxylate of a long chain fatty acid; an N-acylsarcosinate; mono- or di-esters of phosphoric acid with fatty alcohol ethoxylates or salts of such esters; fatty alcohol sulfates such as sodium dodecyl sulfate, sodium octadecyl sulfate, or sodium cetyl sulfate; ethoxylated fatty alcohol sulfates; ethoxylated alkylphenol sulfates; lignin sulfonates; petroleum sulfonates; alkyl aryl sulfonates such as alkyl-benzene sulfonates or lower alkylnaphtalene sulfonates, e.g., butyl-naphthalene sulfonate; salts of sulfonated naphthalene-formaldehyde condensates; salts of sulfonated phenol-formaldehyde condensates; more complex sulfonates such as the amide sulfonates, e.g., the sulfonated condensation product of oleic acid and N-methyl taurine; or the dialkyl sulfosuccinates, e.g., the sodium sulfonate or dioctyl succinate. Non-ionic agents include condensation products of fatty acid esters, fatty alcohols, fatty acid amides or fatty-alkyl- or alkenyl-substituted phenols with ethylene oxide, fatty esters of polyhydric alcohol ethers, e.g., sorbitan fatty acid esters, condensation products of such esters with ethylene oxide, e.g., polyoxyethylene sorbitan fatty acid esters, block copolymers of ethylene oxide and propylene oxide, acetylenic glycols such as 2,4,7,9-tetraethyl-5-decyn-4,7-diol, or ethoxylated acetylenic glycols. Examples of a cationic surface-active agent include, for instance, an aliphatic mono-, di-, or polyamine such as an acetate, naphthenate or oleate; or oxygen-containing amine such as an amine oxide of polyoxyethylene alkylamine; an amide-linked amine prepared by the condensation of a carboxylic acid with a di- or polyamine; or a quaternary ammonium salt.

[0108] Examples of inert materials include, but are not limited to, inorganic minerals such as kaolin, phyllosilicates, carbonates, sulfates, phosphates, or botanical materials such as cork, powdered corncobs, peanut hulls, rice hulls, and walnut shells.

[0109] The compositions comprising the silencing element can be in a suitable form for direct application or as a concentrate of primary composition that requires dilution with a suitable quantity of water or other dilutant before application.

[0110] The compositions (including the transformed microorganisms) can be applied to the environment of an insect pest (such as a Coleoptera plant pest or a Diabrotica plant pest) by, for example, spraying, atomizing, dusting, scattering, coating or pouring, introducing into or on the soil, introducing into irrigation water, by seed treatment or general application or dusting at the time when the pest has begun to appear or before the appearance of pests as a protective measure. For example, the composition(s) and/or transformed microorganism(s) may be mixed with grain to protect the grain during storage. It is generally important to obtain good control of pests in the early stages of plant growth, as this is the time when the plant can be most severely damaged. The compositions can conveniently contain another insecticide if this is thought necessary. In an embodiment of the invention, the composition(s) is applied directly to the soil, at a time of planting, in granular form of a composition of a carrier and dead cells of a Bacillus strain or transformed microorganism of the invention. Another embodiment is a granular form of a composition comprising an agrochemical such as, for example, a herbicide, an insecticide, a fertilizer, in an inert carrier, and dead cells of a Bacillus strain or transformed microorganism of the invention.

VII. Plants, Plant Parts, and Methods of Introducing Sequences into Plants

[0111] In one embodiment, the methods of the invention involve introducing a polynucleotide into a plant. “Introducing” is intended to mean presenting to the plant the polynucleotide in such a manner that the sequence gains access to the interior of a cell of the plant. The methods of the invention do not depend on a particular method for introducing a sequence into a plant, only that the polynucleotide or polypeptides gains access to the interior of at least one cell of the plant. Methods for introducing polynucleotides into plants are known in the art including, but not limited to, stable transformation methods, transient transformation methods, and virus-mediated methods.

[0112] “Stable transformation” is intended to mean that the nucleotide construct introduced into a plant integrates into the genome of the plant and is capable of being inherited by the progeny thereof “Transient transformation” is intended to mean that a polynucleotide is introduced into the plant and does not integrate into the genome of the plant or a polypeptide is introduced into a plant.

[0113] Transformation protocols as well as protocols for introducing polypeptides or polynucleotide sequences into plants may vary depending on the type of plant or plant cell, i.e., monocot or dicot, targeted for transformation. Suitable methods of introducing polypeptides and polynucleotides into plant cells include microinjection (Crossway et al. (1986) Biotechniques 4:320-334), electroporation (Riggs et al. (1986) Proc. Natl. Acad. Sci. USA 83:5602-5606, Agrobacterium-mediated transformation (U.S. Pat. No. 5,563,055 and U.S. Pat. No. 5,981,840), direct gene transfer (Paszkowski et al. (1984) EMBO J. 3:2717-2722), and ballistic particle acceleration (see, for example, U.S. Pat. No. 4,945,050; U.S. Pat. No. 5,879,918; U.S. Pat. Nos. 5,886,244; and, 5,932,782; Tomes et al. (1995) in Plant Cell, Tissue, and Organ Culture: Fundamental Methods, ed. Gamborg and Phillips (Springer-Verlag, Berlin); McCabe et al. (1988) Biotechnology 6:923-926); and Lec1 transformation (WO 00/28058). Also see Weissinger et al. (1988) Ann. Rev. Genet. 22:421-477; Sanford et al. (1987) Particulate Science and Technology 5:27-37 (onion); Christou et al. (1988) Plant Physiol. 87:671-674 (soybean); McCabe et al. (1988) Bio/Technology 6:923-926 (soybean); Finer and McMullen (1991) In Vitro Cell Dev. Biol. 27P:175-182 (soybean); Singh et al. (1998) Theor. Appl. Genet. 96:319-324 (soybean); Datta et al. (1990) Biotechnology 8:736-740 (rice); Klein et al. (1988) Proc. Natl. Acad. Sci. USA 85:4305-4309 (maize); Klein et al. (1988) Biotechnology 6:559-563 (maize); U.S. Pat. Nos. 5,240,855; 5,322,783; and, 5,324,646; Klein et al. (1988) Plant Physiol. 91:440-444 (maize); Fromm et al. (1990) Biotechnology 8:833-839 (maize); Hooykaas-Van Slogteren et al. (1984) Nature (London) 311:763-764; U.S. Pat. No. 5,736,369 (cereals); Bytebier et al. (1987) Proc. Natl. Acad. Sci. USA 84:5345-5349 (Liliaceae); De Wet et al. (1985) in The Experimental Manipulation of Ovule Tissues, ed. Chapman et al. (Longman, New York), pp. 197-209 (pollen); Kaeppler et al. (1990) Plant Cell Reports 9:415-418 and Kaeppler et al. (1992) Theor. Appl. Genet. 84:560-566 (whisker-mediated transformation); D'Halluin et al. (1992) Plant Cell 4:1495-1505 (electroporation); Li et al. (1993) Plant Cell Reports 12:250-255 and Christou and Ford (1995) Annals of Botany 75:407-413 (rice); Osjoda et al. (1996) Nature Biotechnology 14:745-750 (maize via Agrobacterium tumefaciens); all of which are herein incorporated by reference.

[0114] In specific embodiments, the silencing element sequences of the invention can be provided to a plant using a variety of transient transformation methods. Such transient transformation methods include, but are not limited to, the introduction of the protein or variants and fragments thereof directly into the plant or the introduction of the transcript into the plant. Such methods include, for example, microinjection or particle bombardment. See, for example, Crossway et al. (1986) Mol Gen. Genet. 202:179-185; Nomura et al. (1986) Plant Sci. 44:53-58; Hepler et al. (1994) Proc. Natl. Acad. Sci. 91: 2176-2180 and Hush et al. (1994) The Journal of Cell Science 107:775-784, all of which are herein incorporated by reference. Alternatively, polynucleotides can be transiently transformed into the plant using techniques known in the art. Such techniques include viral vector systems and the precipitation of the polynucleotide in a manner that precludes subsequent release of the DNA. Thus, the transcription from the particle-bound DNA can occur, but the frequency with which it is released to become integrated into the genome is greatly reduced. Such methods include the use of particles coated with polyethylimine (PEI; Sigma #P3143).

[0115] In other embodiments, the polynucleotide of the invention may be introduced into plants by contacting plants with a virus or viral nucleic acids. Generally, such methods involve incorporating a nucleotide construct of the invention within a viral DNA or RNA molecule. Further, it is recognized that promoters of the invention also encompass promoters utilized for transcription by viral RNA polymerases. Methods for introducing polynucleotides into plants and expressing a protein encoded therein, involving viral DNA or RNA molecules, are known in the art. See, for example, U.S. Pat. Nos. 5,889,191, 5,889,190, 5,866,785, 5,589,367, 5,316,931, and Porta et al. (1996) Molecular Biotechnology 5:209-221; herein incorporated by reference.

[0116] Methods are known in the art for the targeted insertion of a polynucleotide at a specific location in the plant genome. In one embodiment, the insertion of the polynucleotide at a desired genomic location is achieved using a site-specific recombination system. See, for example, WO99/25821, WO99/25854, WO99/25840, WO99/25855, and WO99/25853, all of which are herein incorporated by reference. Briefly, the polynucleotide of the invention can be contained in transfer cassette flanked by two non-recombinogenic recombination sites. The transfer cassette is introduced into a plant having stably incorporated into its genome a target site which is flanked by two non-recombinogenic recombination sites that correspond to the sites of the transfer cassette. An appropriate recombinase is provided and the transfer cassette is integrated at the target site. The polynucleotide of interest is thereby integrated at a specific chromosomal position in the plant genome.

[0117] The cells that have been transformed may be grown into plants in accordance with conventional ways. See, for example, McCormick et al. (1986) Plant Cell Reports 5:81-84. These plants may then be grown, and either pollinated with the same transformed strain or different strains, and the resulting progeny having constitutive expression of the desired phenotypic characteristic identified. Two or more generations may be grown to ensure that expression of the desired phenotypic characteristic is stably maintained and inherited and then seeds harvested to ensure expression of the desired phenotypic characteristic has been achieved. In this manner, the present invention provides transformed seed (also referred to as “transgenic seed”) having a polynucleotide of the invention, for example, an expression cassette of the invention, stably incorporated into their genome.

[0118] As used herein, the term plant includes plant cells, plant protoplasts, plant cell tissue cultures from which plants can be regenerated, plant calli, plant clumps, and plant cells that are intact in plants or parts of plants such as embryos, pollen, ovules, seeds, leaves, flowers, branches, fruit, kernels, ears, cobs, husks, stalks, roots, root tips, anthers, and the like. Grain is intended to mean the mature seed produced by commercial growers for purposes other than growing or reproducing the species. Progeny, variants, and mutants of the regenerated plants are also included within the scope of the invention, provided that these parts comprise the introduced polynucleotides.

[0119] The present invention may be used for transformation of any plant species, including, but not limited to, monocots and dicots. Examples of plant species of interest include, but are not limited to, corn (Zea mays), Brassica sp. (e.g., B. napus, B. rapa, B. juncea), particularly those Brassica species useful as sources of seed oil, alfalfa (Medicago sativa), rice (Oryza sativa), rye (Secale cereale), sorghum (Sorghum bicolor, Sorghum vulgare), millet (e.g., pearl millet (Pennisetum glaucum), proso millet (Panicum miliaceum), foxtail millet (Setaria italica), finger millet (Eleusine coracana)), sunflower (Helianthus annuus), safflower (Carthamus tinctorius), wheat (Triticum aestivum), soybean (Glycine max), tobacco (Nicotiana tabacum), potato (Solanum tuberosum), peanuts (Arachis hypogaea), cotton (Gossypium barbadense, Gossypium hirsutum), sweet potato (Ipomoea batatus), cassava (Manihot esculenta), coffee (Coffea spp.), coconut (Cocos nucifera), pineapple (Ananas comosus), citrus trees (Citrus spp.), cocoa (Theobroma cacao), tea (Camellia sinensis), banana (Musa spp.), avocado (Persea americana), fig (Ficus casica), guava (Psidium guajava), mango (Mangifera indica), olive (Olea europaea), papaya (Carica papaya), cashew (Anacardium occidentale), macadamia (Macadamia integrifolia), almond (Prunus amygdalus), sugar beets (Beta vulgaris), sugarcane (Saccharum spp.), oats, barley, vegetables, ornamentals, and conifers.

[0120] Vegetables include tomatoes (Lycopersicon esculentum), lettuce (e.g., Lactuca sativa), green beans (Phaseolus vulgaris), lima beans (Phaseolus limensis), peas (Lathyrus spp.), and members of the genus Cucumis such as cucumber (C. sativus), cantaloupe (C. cantalupensis), and musk melon (C. melo). Ornamentals include azalea (Rhododendron spp.), hydrangea (Macrophylla hydrangea), hibiscus (Hibiscus rosasanensis), roses (Rosa spp.), tulips (Tulipa spp.), daffodils (Narcissus spp.), petunias (Petunia hybrida), carnation (Dianthus caryophyllus), poinsettia (Euphorbia pulcherrima), and chrysanthemum.

[0121] Conifers that may be employed in practicing the present invention include, for example, pines such as loblolly pine (Pinus taeda), slash pine (Pinus elliotii), ponderosa pine (Pinus ponderosa), lodgepole pine (Pinus contorta), and Monterey pine (Pinus radiata); Douglas-fir (Pseudotsuga menziesii); Western hemlock (Tsuga canadensis); Sitka spruce (Picea glauca); redwood (Sequoia sempervirens); true firs such as silver fir (Abies amabilis) and balsam fir (Abies balsamea); and cedars such as Western red cedar (Thuja plicata) and Alaska yellow-cedar (Chamaecyparis nootkatensis). In specific embodiments, plants of the present invention are crop plants (for example, corn, alfalfa, sunflower, Brassica, soybean, cotton, safflower, peanut, sorghum, wheat, millet, tobacco, etc.). In other embodiments, corn and soybean plants and sugarcane plants are optimal, and in yet other embodiments corn plants are optimal.

[0122] Other plants of interest include grain plants that provide seeds of interest, oil-seed plants, and leguminous plants. Seeds of interest include grain seeds, such as corn, wheat, barley, rice, sorghum, rye, etc. Oil-seed plants include cotton, soybean, safflower, sunflower, Brassica, maize, alfalfa, palm, coconut, etc. Leguminous plants include beans and peas. Beans include guar, locust bean, fenugreek, soybean, garden beans, cowpea, mungbean, lima bean, fava bean, lentils, chickpea, etc.

### VIII. Stacking of Traits in Transgenic Plant

[0123] Transgenic plants may comprise a stack of one or more target polynucleotides as set forth in SEQ ID NOS: 1, 4, 5, 8, 9, 12, 13, 16, 17, 20, 21, 24, 25, 28, 29, 32, 33, 36, 37, 40, 41, 44, 45, 48, 49, 52, 53, 54, 55, 56, 57, 60, 61, 64, 65, 68, 69, 72, 73, 76, 77, 80, 81, 84, 85, 88, 89, 92, 93, 96, 97, 100, 101, 104, 105, 108, 109, 112, 113, 116, 117, 120, 121, 124, 125, 128, 129, 132, 133, 136, 137, 140, 141, 144, 145, 148, 149, 152, 153, 156, 157, 160, 161, 164, 165, 168, 169, 172, 173, 176, 177, 180, 181, 184, 185, 188, 189, 192, 193, 196, 197, 200, 201, 204, 205, 208, 209, 212, 213, 216, 217, 220, 221, 224, 225, 228, 229, 232, 233, 236, 237, 240, 241, 244, 245, 248, 249, 252, 253, 256, 257, 260, 261, 264, 265, 268, 269, 272, 273, 276, 277, 280, 281, 284, 285, 288, 289, 292, 293, 296, 297, 300, 301, 304, 305, 308, 309, 312, 313, 316, 317, 320, 321, 324, 325, 328, 329, 332, 333, 336, 337, 340, 341, 344, 345, 348, 349, 352, 353, 356, 357, 360, 361, 364, 365, 368, 369, 372, 373, 376, 377, 380, 381, 384, 385, 388, 389, 392, 393, 396, 397, 400, 401, 404, 405, 408, 409, 412, 413, 416, 417, 420, 421, 424, 425, 428, 429, 432, 433, 436, 437, 440, 441, 444, 445, 448, 449, 452, 453, 456, 457, 460, 461, 464, 465, 468, 469, 472, 473, 476, 477, 480, 481, 484, 485, 488, 489, 492, 493, 496, 497, 500, 501, 504, 505, 508, 509, 512, 513, 516, 517, 520, 521, 524, 525, 528, 529, 532, 533, 536, 537, 540, 541, 544, 545, 548, 549, 552, 553, 556, 557, 560, 561, 562, 563, 564, 565, 566, 567, 568, 569, 570, 571, 572, 573, 574, 575, 576, 577, 578, 579, 580, 581, 582, 583, 584, 585, 586, 587, 588, 589, 590, 591, 592, 593, 594, 595, 596, 597, 598, 599, 600, 601, 602, 603, 604, 605, 606, 607, 608, 609, 610, 611, 612, 613, 614, 615, 616, 617, 618, 619, 620, 621, 622, 623, 624, 625, 626, 627, 628, 629, 630, 631, 632, 633, 634, 635, 636, 637, 638, 639, 640, 641, 642, 643, 644, 645, 646, 647, 648, 649, 650, 651, 652, 653, 654, 655, 656, 657, 658, 659, 660, 661, 662, 663, 664, 665, 666, 667, 668, 669, 670, 671, 672, 673, 674, 675, 676, 677, 678, 679, 680, 681, 682, 683, 684, 685, 686, 687, 688, 689, 690, 691, 692, 693, 694, 695, 696, 697, 700, 701, 702, 703, 706, 707, 708, 709, 712, 713, 714, 715, 718, 719, 720, 721, 724, 725, 726, 727, 728, or active variants or fragments thereof, or complements thereof, as disclosed herein with one or more additional polynucleotides resulting in the production or suppression of multiple polypeptide sequences.

[0124] Transgenic plants comprising stacks of polynucleotide sequences can be obtained by either or both of traditional breeding methods or through genetic engineering methods. These methods include, but are not limited to, breeding individual lines each comprising a polynucleotide of interest, transforming a transgenic plant comprising an expression construct comprising various target polynucleotides as set forth in SEQ ID NOS: 1, 4, 5, 8, 9, 12, 13, 16, 17, 20, 21, 24, 25, 28, 29, 32, 33, 36, 37, 40, 41, 44, 45, 48, 49, 52, 53, 54, 55, 56, 57, 60, 61, 64, 65, 68, 69, 72, 73, 76, 77, 80, 81, 84, 85, 88, 89, 92, 93, 96, 97, 100, 101, 104, 105, 108, 109, 112, 113, 116, 117, 120, 121, 124, 125, 128, 129, 132, 133, 136, 137, 140, 141, 144, 145, 148, 149, 152, 153, 156, 157, 160, 161, 164, 165, 168, 169, 172, 173, 176, 177, 180, 181, 184, 185, 188, 189, 192, 193, 196, 197, 200, 201, 204, 205, 208, 209, 212, 213, 216, 217, 220, 221, 224, 225, 228, 229, 232, 233, 236, 237, 240, 241, 244, 245, 248, 249, 252, 253, 256, 257, 260, 261, 264, 265, 268, 269, 272, 273, 276, 277, 280, 281, 284, 285, 288, 289, 292, 293, 296, 297, 300, 301, 304, 305, 308, 309, 312, 313, 316, 317, 320, 321, 324, 325, 328, 329, 332, 333, 336, 337, 340, 341, 344, 345, 348, 349, 352, 353, 356, 357, 360, 361, 364, 365, 368, 369, 372, 373, 376, 377, 380, 381, 384, 385, 388, 389, 392, 393, 396, 397, 400, 401, 404, 405, 408, 409, 412, 413, 416, 417, 420, 421, 424, 425, 428, 429, 432, 433, 436, 437, 440, 441, 444, 445, 448, 449, 452, 453, 456, 457, 460, 461, 464, 465, 468, 469, 472, 473, 476, 477, 480, 481, 484, 485, 488, 489, 492, 493, 496, 497, 500, 501, 504, 505, 508, 509, 512, 513, 516, 517, 520, 521, 524, 525, 528, 529, 532, 533, 536, 537, 540, 541, 544, 545, 548, 549, 552, 553, 556, 557, 560, 561, 562, 563, 564, 565, 566, 567, 568, 569, 570, 571, 572, 573, 574, 575, 576, 577, 578, 579, 580, 581, 582, 583, 584, 585, 586, 587, 588, 589, 590, 591, 592, 593, 594, 595, 596, 597, 598, 599, 600, 601, 602, 603, 604, 605, 606, 607, 608, 609, 610, 611, 612, 613, 614, 615, 616, 617, 618, 619, 620, 621, 622, 623, 624, 625, 626, 627, 628, 629, 630, 631, 632, 633, 634, 635, 636, 637, 638, 639, 640, 641, 642, 643, 644, 645, 646, 647, 648, 649, 650, 651, 652, 653, 654, 655, 656, 657, 658, 659, 660, 661, 662, 663, 664, 665, 666, 667, 668, 669, 670, 671, 672, 673, 674, 675, 676, 677, 678, 679, 680, 681, 682, 683, 684, 685, 686, 687, 688, 689, 690, 691, 692, 693, 694, 695, 696, 697, 700, 701, 702, 703, 706, 707, 708, 709, 712, 713, 714, 715, 718, 719, 720, 721, 724, 725, 726, 727, 728, or active variants or fragments thereof, or complements thereof, as disclosed herein with a subsequent gene and co-transformation of genes into a single plant cell. As used herein, the term “stacked” includes having the multiple traits present in the same plant (i.e., both traits are incorporated into the nuclear genome, one trait is incorporated into the nuclear genome and one trait is incorporated into the genome of a plastid or both traits are incorporated into the genome of a plastid). In one non-limiting example, “stacked traits” comprise a molecular stack where the sequences are physically adjacent to each other. A trait, as used herein, refers to the phenotype derived from a particular sequence or groups of sequences. Co-transformation of polynucleotides can be carried out using single transformation vectors comprising multiple polynucleotides or polynucleotides carried separately on multiple vectors. If the sequences are stacked by genetically transforming the plants, the polynucleotide sequences of interest can be combined at any time and in any order. The traits can be introduced simultaneously in a co-transformation protocol with the polynucleotides of interest provided by any combination of transformation cassettes. For example, if two sequences will be introduced, the two sequences can be contained in separate transformation cassettes (trans) or contained on the same transformation cassette (cis). Expression of the sequences can be driven by the same promoter or by different promoters. It is further recognized that polynucleotide sequences can be stacked at a desired genomic location using a site-specific recombination system. See, for example, WO 1999/25821, WO 1999/25854, WO 1999/25840, WO 1999/25855 and WO 1999/25853, all of which are herein incorporated by reference.

[0125] In some embodiments the various target polynucleotides as set forth in SEQ ID NOS: 1, 4, 5, 8, 9, 12, 13, 16, 17, 20, 21, 24, 25, 28, 29, 32, 33, 36, 37, 40, 41, 44, 45, 48, 49, 52, 53, 54, 55, 56, 57, 60, 61, 64, 65, 68, 69, 72, 73, 76, 77, 80, 81, 84, 85, 88, 89, 92, 93, 96, 97, 100, 101, 104, 105, 108, 109, 112, 113, 116, 117, 120, 121, 124, 125, 128, 129, 132, 133, 136, 137, 140, 141, 144, 145, 148, 149, 152, 153, 156, 157, 160, 161, 164, 165, 168, 169, 172, 173, 176, 177, 180, 181, 184, 185, 188, 189, 192, 193, 196, 197, 200, 201, 204, 205, 208, 209, 212, 213, 216, 217, 220, 221, 224, 225, 228, 229, 232, 233, 236, 237, 240, 241, 244, 245, 248, 249, 252, 253, 256, 257, 260, 261, 264, 265, 268, 269, 272, 273, 276, 277, 280, 281, 284, 285, 288, 289, 292, 293, 296, 297, 300, 301, 304, 305, 308, 309, 312, 313, 316, 317, 320, 321, 324, 325, 328, 329, 332, 333, 336, 337, 340, 341, 344, 345, 348, 349, 352, 353, 356, 357, 360, 361, 364, 365, 368, 369, 372, 373, 376, 377, 380, 381, 384, 385, 388, 389, 392, 393, 396, 397, 400, 401, 404, 405, 408, 409, 412, 413, 416, 417, 420, 421, 424, 425, 428, 429, 432, 433, 436, 437, 440, 441, 444, 445, 448, 449, 452, 453, 456, 457, 460, 461, 464, 465, 468, 469, 472, 473, 476, 477, 480, 481, 484, 485, 488, 489, 492, 493, 496, 497, 500, 501, 504, 505, 508, 509, 512, 513, 516, 517, 520, 521, 524, 525, 528, 529, 532, 533, 536, 537, 540, 541, 544, 545, 548, 549, 552, 553, 556, 557, 560, 561, 562, 563, 564, 565, 566, 567, 568, 569, 570, 571, 572, 573, 574, 575, 576, 577, 578, 579, 580, 581, 582, 583, 584, 585, 586, 587, 588, 589, 590, 591, 592, 593, 594, 595, 596, 597, 598, 599, 600, 601, 602, 603, 604, 605, 606, 607, 608, 609, 610, 611, 612, 613, 614, 615, 616, 617, 618, 619, 620, 621, 622, 623, 624, 625, 626, 627, 628, 629, 630, 631, 632, 633, 634, 635, 636, 637, 638, 639, 640, 641, 642, 643, 644, 645, 646, 647, 648, 649, 650, 651, 652, 653, 654, 655, 656, 657, 658, 659, 660, 661, 662, 663, 664, 665, 666, 667, 668, 669, 670, 671, 672, 673, 674, 675, 676, 677, 678, 679, 680, 681, 682, 683, 684, 685, 686, 687, 688, 689, 690, 691, 692, 693, 694, 695, 696, 697, 700, 701, 702, 703, 706, 707, 708, 709, 712, 713, 714, 715, 718, 719, 720, 721, 724, 725, 726, 727, 728, or active variants or fragments thereof, or complements thereof, as disclosed herein, alone or stacked with one or more additional insect resistance traits can be stacked with one or more additional input traits (e.g., herbicide resistance, fungal resistance, virus resistance, stress tolerance, disease resistance, male sterility, stalk strength, and the like) or output traits (e.g., increased yield, modified starches, improved oil profile, balanced amino acids, high lysine or methionine, increased digestibility, improved fiber quality, drought resistance, and the like). Thus, the polynucleotide embodiments can be used to provide a complete agronomic package of improved crop quality with the ability to flexibly and cost effectively control any number of agronomic pests.

[0126] Transgenes useful for stacking include, but are not limited to, to those as described herein below.

[0127] i. Transgenes that Confer Resistance to Insects or Disease

[0128] (A) Plant disease resistance genes. Plant defenses are often activated by specific interaction between the product of a disease resistance gene (R) in the plant and the product of a corresponding avirulence (Avr) gene in the pathogen. A plant variety can be transformed with cloned resistance gene to engineer plants that are resistant to specific pathogen strains. See, for example, Jones, et al., (1994) Science 266:789 (cloning of the tomato Cf-9 gene for resistance to Cladosporium fulvum); Martin, et al., (1993) Science 262:1432 (tomato Pto gene for resistance to Pseudomonas syringae pv. tomato encodes a protein kinase); Mindrinos, et al., (1994) Cell 78:1089 (Arabidopsis RSP2 gene for resistance to Pseudomonas syringae), McDowell and Woffenden, (2003) Trends Biotechnol. 21(4):178-83 and Toyoda, et al., (2002) Transgenic Res. 11(6):567-82. A plant resistant to a disease is one that is more resistant to a pathogen as compared to the wild type plant.

[0129] (B) Genes encoding a Bacillus thuringiensis protein, a derivative thereof or a synthetic polypeptide modeled thereon. See, for example, Geiser, et al., (1986) Gene 48:109, who disclose the cloning and nucleotide sequence of a Bt delta-endotoxin gene. Moreover, DNA molecules encoding delta-endotoxin genes can be purchased from American Type Culture Collection (Rockville, Md.), for example, under ATCC Accession Numbers 40098, 67136, 31995 and 31998. Other non-limiting examples of Bacillus thuringiensis transgenes being genetically engineered are given in the following patents and patent applications and hereby are incorporated by reference for this purpose: U.S. Pat. Nos. 5,188,960; 5,689,052; 5,880,275; 5,986,177; 6,023,013, 6,060,594, 6,063,597, 6,077,824, 6,620,988, 6,642,030, 6,713,259, 6,893,826, 7,105,332; 7,179,965, 7,208,474; 7,227,056, 7,288,643, 7,323,556, 7,329,736, 7,449,552, 7,468,278, 7,510,878, 7,521,235, 7,544,862, 7,605,304, 7,696,412, 7,629,504, 7,705,216, 7,772,465, 7,790,846, 7,858,849 and WO 1991/14778; WO 1999/31248; WO 2001/12731; WO 1999/24581 and WO 1997/40162.

[0130] Genes encoding pesticidal proteins may also be stacked including but are not limited to: insecticidal proteins from Pseudomonas sp. such as PSEEN3174 (Monalysin, (2011) PLoS Pathogens, 7:1-13), from Pseudomonas protegens strain CHA0 and Pf-5 (previously fluorescens) (Pechy-Tarr, (2008) Environmental Microbiology 10:2368-2386: Gen Bank Accession No. EU400157); from Pseudomonas Taiwanensis (Liu, et al., (2010) J. Agric. Food Chem. 58:12343-12349) and from Pseudomonas pseudoalcligenes (Zhang, et al., (2009) Annals of Microbiology 59:45-50 and Li, et al., (2007) Plant Cell Tiss. Organ Cult. 89:159-168); insecticidal proteins from Photorhabdus sp. and Xenorhabdus sp. (Hinchliffe, et al., (2010) The Open Toxinology Journal 3:101-118 and Morgan, et al., (2001) Applied and Envir. Micro. 67:2062-2069), U.S. Pat. No. 6,048,838, and U.S. Pat. No. 6,379,946; and .delta.-endotoxins including, but not limited to, the Cry1, Cry2, Cry3, Cry4, Cry5, Cry6, Cry7, Cry8, Cry9, Cry10, Cry11, Cry12, Cry13, Cry14, Cry15, Cry16, Cry17, Cry18, Cry19, Cry20, Cry21, Cry22, Cry23, Cry24, Cry25, Cry26, Cry27, Cry 28, Cry 29, Cry 30, Cry31, Cry32, Cry33, Cry34, Cry35, Cry36, Cry37, Cry38, Cry39, Cry40, Cry41, Cry42, Cry43, Cry44, Cry45, Cry 46, Cry47, Cry49, Cry 51 and Cry55 classes of delta-endotoxin genes and the B. thuringiensis cytolytic Cyt1 and Cyt2 genes. Members of these classes of B. thuringiensis insecticidal proteins include, but are not limited to Cry1Aa1 (Accession #Accession #M11250), Cry1Aa2 (Accession #M10917), Cry1Aa3 (Accession #D00348), Cry1Aa4 (Accession #X13535), Cry1Aa5 (Accession #D17518), Cry1Aa6 (Accession #U43605), Cry1Aa7 (Accession #AF081790), Cry1Aa8 (Accession #126149), Cry1Aa9 (Accession #AB026261), Cry1Aa10 (Accession #AF154676), Cry1Aa11 (Accession #Y09663), Cry1Aa12 (Accession #AF384211), Cry1Aa13 (Accession #AF510713), Cry1Aa14 (Accession #AY197341), Cry1Aa15 (Accession #DQ062690), Cry1Ab1 (Accession #M13898), Cry1Ab2 (Accession #M12661), Cry1Ab3 (Accession #M15271), Cry1Ab4 (Accession #D00117), Cry1Ab5 (Accession #X04698), Cry1Ab6 (Accession #M37263), Cry1Ab7 (Accession #X13233), Cry1Ab8 (Accession #M16463), Cry1Ab9 (Accession #X54939), Cry1Ab10 (Accession #A29125), Cry1Ab11 (Accession #112419), Cry1Ab12 (Accession #AF059670), Cry1Ab13 (Accession #AF254640), Cry1Ab14 (Accession #U94191), Cry1Ab15 (Accession #AF358861), Cry1Ab16 (Accession #AF375608), Cry1Ab17 (Accession #AAT46415), Cry1Ab18 (Accession #AAQ88259), Cry1Ab19 (Accession #AY847289), Cry1Ab20 (Accession #DQ241675), Cry1Ab21 (Accession #EF683163), Cry1Ab22 (Accession #ABW87320), Cry1Ab-like (Accession #AF327924), Cry1Ab-like (Accession #AF327925), Cry1Ab-like (Accession #AF327926), Cry1Ab-like (Accession #DQ781309), Cry1Ac1 (Accession #M11068), Cry1Ac2 (Accession #M35524), Cry1Ac3 (Accession #X54159), Cry1Ac4 (Accession #M73249), Cry1Ac5 (Accession #M73248), Cry1Ac6 (Accession #U43606), Cry1Ac7 (Accession #U87793), Cry1Ac8 (Accession #U87397), Cry1Ac9 (Accession #U89872), Cry1Ac10 (Accession #AJ002514), Cry1Ac11 (Accession #AJ130970), Cry1Ac12 (Accession #112418), Cry1Ac13 (Accession #AF148644), Cry1Ac14 (Accession #AF492767), Cry1Ac15 (Accession #AY122057), Cry1Ac16 (Accession #AY730621), Cry1Ac17 (Accession #AY925090), Cry1Ac18 (Accession #DQ023296), Cry1Ac19 (Accession #DQ195217), Cry1Ac20 (Accession #DQ285666), Cry1Ac21 (Accession #DQ062689), Cry1Ac22 (Accession #EU282379), Cry1Ac23 (Accession #AM949588), Cry1Ac24 (Accession #ABL01535), Cry1Ad1 (Accession #M73250), Cry1Ad2 (Accession #A27531), Cry1Ae1 (Accession #M65252), Cry1Af1 (Accession #U82003), Cry1Ag1 (Accession #AF081248), Cry1Ah1 (Accession #AF281866), Cry1Ah2 (Accession #DQ269474), Cry1Ai1 (Accession #AY174873), Cry1A-like (Accession #AF327927), Cry1Ba1 (Accession #X06711), Cry1Ba2 (Accession #X95704), Cry1Ba3 (Accession #AF368257), Cry1Ba4 (Accession #AF363025), Cry1Ba5 (Accession #AB020894), Cry1Ba6 (Accession #ABL60921), Cry1Bb1 (Accession #L32020), Cry1Bc1 (Accession #Z46442), Cry1Bd1 (Accession #U70726), Cry1Bd2 (Accession #AY138457), Cry1Be1 (Accession #AF077326), Cry1Be2 (Accession #AAQ52387), Cry1Bf1 (Accession #AX189649), Cry1Bf2 (Accession #AAQ52380), Cry1Bg1 (Accession #AY176063), Cry1Ca1 (Accession #X07518), Cry1Ca2 (Accession #X13620), Cry1Ca3 (Accession #M73251), Cry1Ca4 (Accession #A27642), Cry1Ca5 (Accession #X96682), Cry1Ca6 [1] (Accession #AF215647), Cry1Ca7 (Accession #AY015492), Cry1Ca8 (Accession #AF362020), Cry1Ca9 (Accession #AY078160), Cry1Ca10 (Accession #AF540014), Cry1Ca11 (Accession #AY955268), Cry1Cb1 (Accession #M97880), Cry1Cb2 (Accession #AY007686), Cry1Cb3 (Accession #EU679502), Cry1Cb-like (Accession #AAX63901), Cry1Da1 (Accession #X54160), Cry1Da2 (Accession #176415), Cry1Db1 (Accession #Z22511), Cry1Db2 (Accession #AF358862), Cry1Dc1 (Accession #EF059913), Cry1Ea1 (Accession #X53985), Cry1Ea2 (Accession #X56144), Cry1Ea3 (Accession #M73252), Cry1Ea4 (Accession #U94323), Cry1Ea5 (Accession #A15535), Cry1Ea6 (Accession #AF202531), Cry1 Ea7 (Accession #AAW72936), Cry1 Ea8 (Accession #ABX11258), Cry1Eb1 (Accession #M73253), Cry1Fa1 (Accession #M63897), Cry1Fa2 (Accession #M73254), Cry1Fb1 (Accession #Z22512), Cry1Fb2 (Accession #AB012288), Cry1Fb3 (Accession #AF062350), Cry1Fb4 (Accession #I73895), Cry1Fb5 (Accession #AF336114), Cry1Fb6 (Accession #EU679500), Cry1Fb7 (Accession #EU679501), Cry1Ga1 (Accession #Z22510), Cry1Ga2 (Accession #Y09326), Cry1Gb1 (Accession #U70725), Cry1Gb2 (Accession #AF288683), Cry1Gc (Accession #AAQ52381), Cry1Ha1 (Accession #Z22513), Cry1Hb1 (Accession #U35780), Cry1H-like (Accession #AF182196), Cry1Ia1 (Accession #X62821), Cry1Ia2 (Accession #M98544), Cry1Ia3 (Accession #L36338), Cry1Ia4 (Accession #L49391), Cry1Ia5 (Accession #Y08920), Cry1Ia6 (Accession #AF076953), Cry1Ia7 (Accession #AF278797), Cry1Ia8 (Accession #AF373207), Cry1Ia9 (Accession #AF521013), Cry1Ia10 (Accession #AY262167), Cry1Ia11 (Accession #AJ315121), Cry1Ia12 (Accession #AAV53390), Cry1Ia13 (Accession #ABF83202), Cry1Ia14 (Accession #EU887515), Cry1Ib1 (Accession #U07642), Cry1Ib2 (Accession #ABW88019), Cry1Ib3 (Accession #EU677422), Cry1Ic1 (Accession #AF056933), Cry1Ic2 (Accession #AAE71691), Cry1Id1 (Accession #AF047579), Cry1Ie1 (Accession #AF211190), Cry1If1 (Accession #AAQ52382), Cry1I-like (Accession #I90732), Cry1I-like (Accession #DQ781310), Cry1Ja1 (Accession #L32019), Cry1Jb1 (Accession #U31527), Cry1Jc1 (Accession #190730), Cry1Jc2 (Accession #AAQ52372), Cry1Jd1 (Accession #AX189651), Cry1Ka1 (Accession #U28801), Cry1La1 (Accession #AAS60191), Cry1-like (Accession #I90729), Cry2Aa1 (Accession #M31738), Cry2Aa2 (Accession #M23723), Cry2Aa3 (Accession #D86064), Cry2Aa4 (Accession #AF047038), Cry2Aa5 (Accession #AJ 132464), Cry2Aa6 (Accession #AJ 132465), Cry2Aa7 (Accession #AJ132463), Cry2Aa8 (Accession #AF252262), Cry2Aa9 (Accession #AF273218), Cry2Aa10 (Accession #AF433645), Cry2Aa11 (Accession #AAQ52384), Cry2Aa12 (Accession #DQ977646), Cry2Aa13 (Accession #ABL01536), Cry2Aa14 (Accession #ACF04939), Cry2Ab1 (Accession #M23724), Cry2Ab2 (Accession #X55416), Cry2Ab3 (Accession #AF164666), Cry2Ab4 (Accession #AF336115), Cry2Ab5 (Accession #AF441855), Cry2Ab6 (Accession #AY297091), Cry2Ab7 (Accession #DQ119823), Cry2Ab8 (Accession #DQ361266), Cry2Ab9 (Accession #DQ341378), Cry2Ab10 (Accession #EF157306), Cry2Ab11 (Accession #AM691748), Cry2Ab12 (Accession #ABM21764), Cry2Ab13 (Accession #EU909454), Cry2Ab14 (Accession #EU909455), Cry2Ac1 (Accession #X57252), Cry2Ac2 (Accession #AY007687), Cry2Ac3 (Accession #AAQ52385), Cry2Ac4 (Accession #DQ361267), Cry2Ac5 (Accession #DQ341379), Cry2Ac6 (Accession #DQ359137), Cry2Ac7 (Accession #AM292031), Cry2Ac8 (Accession #AM421903), Cry2Ac9 (Accession #AM421904), Cry2Ac10 (Accession #BI 877475), Cry2Ac11 (Accession #AM689531), Cry2Ac12 (Accession #AM689532), Cry2Ad1 (Accession #AF200816), Cry2Ad2 (Accession #DQ358053), Cry2Ad3 (Accession #AM268418), Cry2Ad4 (Accession #AM490199), Cry2Ad5 (Accession #AM765844), Cry2Ae1 (Accession #AAQ52362), Cry2Af1 (Accession #EF439818), Cry2Ag (Accession #ACH91610), Cry2Ah (Accession #EU939453), Cry3Aa1 (Accession #M22472), Cry3Aa2 (Accession #J02978), Cry3Aa3 (Accession #Y00420), Cry3Aa4 (Accession #M30503), Cry3Aa5 (Accession #M37207), Cry3Aa6 (Accession #U10985), Cry3Aa7 (Accession #AJ237900), Cry3Aa8 (Accession #AAS79487), Cry3Aa9 (Accession #AAW05659), Cry3Aa10 (Accession #AAU29411), Cry3Aa11 (Accession #AY882576), Cry3Aa12 (Accession #ABY49136), Cry3Ba1 (Accession #X17123), Cry3Ba2 (Accession #A07234), Cry3Bb1 (Accession #M89794), Cry3Bb2 (Accession #U31633), Cry3Bb3 (Accession #I15475), Cry3Ca1 (Accession #X59797), Cry4Aa1 (Accession #Y00423), Cry4Aa2 (Accession #D00248), Cry4Aa3 (Accession #AL731825), Cry4A-like (Accession #DQ078744), Cry4Ba1 (Accession #X07423), Cry4Ba2 (Accession #X07082), Cry4Ba3 (Accession #M20242), Cry4Ba4 (Accession #D00247), Cry4Ba5 (Accession #AL731825), Cry4Ba-like (Accession #ABC47686), Cry4Ca1 (Accession #EU646202), Cry5Aa1 (Accession #L07025), Cry5Ab1 (Accession #L07026), Cry5Ac1 (Accession #I34543), Cry5Ad1 (Accession #EF219060), Cry5Ba1 (Accession #U19725), Cry5Ba2 (Accession #EU121522), Cry6Aa1 (Accession #L07022), Cry6Aa2 (Accession #AF499736), Cry6Aa3 (Accession #DQ835612), Cry6Ba1 (Accession #L07024), Cry7Aa1 (Accession #M64478), Cry7Ab1 (Accession #U04367), Cry7Ab2 (Accession #U04368), Cry7Ab3 (Accession #BI 1015188), Cry7Ab4 (Accession #EU380678), Cry7Ab5 (Accession #ABX9555), Cry7Ab6 (Accession #FJ194973), Cry7Ba1 (Accession #ABB70817), Cry7Ca1 (Accession #EF486523), Cry8Aa1 (Accession #U04364), Cry8Ab1 (Accession #EU044830), Cry8Ba1 (Accession #U04365), Cry8Bb1 (Accession #AX543924), Cry8Bc1 (Accession #AX543926), Cry8Ca1 (Accession #U04366), Cry8Ca2 (Accession #AAR98783), Cry8Ca3 (Accession #EU625349), Cry8Da1 (Accession #AB089299), Cry8Da2 (Accession #BD133574), Cry8Da3 (Accession #BD133575), Cry8 Db1 (Accession #AB303980), Cry8Ea1 (Accession #AY329081), Cry8Ea2 (Accession #EU047597), Cry8Fa1 (Accession #AY551093), Cry8Ga1 (Accession #AY590188), Cry8Ga2 (Accession #DQ318860), Cry8Ga3 (Accession #FJ198072), Cry8Ha1 (Accession #EF465532), Cry8Ia1 (Accession #EU381044), Cry8Ja1 (Accession #EU625348), Cry8 like (Accession #ABS53003), Cry9Aa1 (Accession #X58120), Cry9Aa2 (Accession #X58534), Cry9Aa like (Accession #AAQ52376), Cry9Ba1 (Accession #X75019), Cry9Bb1 (Accession #AY758316), Cry9Ca1 (Accession #Z37527), Cry9Ca2 (Accession #AAQ52375), Cry9Da1 (Accession #D85560), Cry9Da2 (Accession #AF042733), Cry9 Db1 (Accession #AY971349), Cry9Ea1 (Accession #AB011496), Cry9Ea2 (Accession #AF358863), Cry9Ea3 (Accession #EF157307), Cry9Ea4 (Accession #EU760456), Cry9Ea5 (Accession #EU789519), Cry9Ea6 (Accession #EU887516), Cry9Eb1 (Accession #AX189653), Cry9Ec1 (Accession #AF093107), Cry9Ed1 (Accession #AY973867), Cry9 like (Accession #AF093107), Cry10Aa1 (Accession #M12662), Cry10Aa2 (Accession #E00614), Cry10Aa3 (Accession #AL731825), Cry10A like (Accession #DQ167578), Cry1JAa1 (Accession #M31737), Cry1JAa2 (Accession #M22860), Cry1JAa3 (Accession #AL731825), Cry1IAa-like (Accession #DQ166531), Cry1 iBa1 (Accession #X86902), Cry11Bb1 (Accession #AF017416), Cry12Aa1 (Accession #L07027), Cry13Aa1 (Accession #L07023), Cry14Aa1 (Accession #U13955), Cry15Aa1 (Accession #M76442), Cry16Aa1 (Accession #X94146), Cry17Aa1 (Accession #X99478), Cry18Aa1 (Accession #X99049), Cry18Ba1 (Accession #AF169250), Cry18Ca1 (Accession #AF169251), Cry19Aa1 (Accession #Y07603), Cry19Ba1 (Accession #D88381), Cry20Aa1 (Accession #U82518), Cry21Aa1 (Accession #I32932), Cry21Aa2 (Accession #I66477), Cry21Ba1 (Accession #AB088406), Cry22Aa1 (Accession #134547), Cry22Aa2 (Accession #AX472772), Cry22Aa3 (Accession #EU715020), Cry22Ab1 (Accession #AAK50456), Cry22Ab2 (Accession #AX472764), Cry22Ba1 (Accession #AX472770), Cry23Aa1 (Accession #AAF76375), Cry24Aa1 (Accession #U88188), Cry24Ba1 (Accession #BAD32657), Cry24Ca1 (Accession #AM158318), Cry25Aa1 (Accession #U88189), Cry26Aa1 (Accession #AF122897), Cry27Aa1 (Accession #AB023293), Cry28Aa1 (Accession #AF132928), Cry28Aa2 (Accession #AF285775), Cry29Aa1 (Accession #AJ251977), Cry30Aa1 (Accession #AJ251978), Cry30Ba1 (Accession #BAD00052), Cry30Ca1 (Accession #BAD67157), Cry30Da1 (Accession #EF095955), Cry30 Db1 (Accession #BAE80088), Cry30Ea1 (Accession #EU503140), Cry30Fa1 (Accession #EU751609), Cry30Ga1 (Accession #EU882064), Cry31Aa1 (Accession #AB031065), Cry31Aa2 (Accession #AY081052), Cry31Aa3 (Accession #AB250922), Cry31Aa4 (Accession #AB274826), Cry31Aa5 (Accession #AB274827), Cry31Ab1 (Accession #AB250923), Cry31Ab2 (Accession #AB274825), Cry31Ac1 (Accession #AB276125), Cry32Aa1 (Accession #AY008143), Cry32Ba1 (Accession #BAB78601), Cry32Ca1 (Accession #BAB78602), Cry32Da1 (Accession #BAB78603), Cry33Aa1 (Accession #AAL26871), Cry34Aa1 (Accession #AAG50341), Cry34Aa2 (Accession #AAK64560), Cry34Aa3 (Accession #AY536899), Cry34Aa4 (Accession #AY536897), Cry34Ab1 (Accession #AAG41671), Cry34Ac1 (Accession #AAG50118), Cry34Ac2 (Accession #AAK64562), Cry34Ac3 (Accession #AY536896), Cry34Ba1 (Accession #AAK64565), Cry34Ba2 (Accession #AY536900), Cry34Ba3 (Accession #AY536898), Cry35Aa1 (Accession #AAG50342), Cry35Aa2 (Accession #AAK64561), Cry35Aa3 (Accession #AY536895), Cry35Aa4 (Accession #AY536892), Cry35Ab1 (Accession #AAG41672), Cry35Ab2 (Accession #AAK64563), Cry35Ab3 (Accession #AY536891), Cry35Ac1 (Accession #AAG50117), Cry35Ba1 (Accession #AAK64566), Cry35Ba2 (Accession #AY536894), Cry35Ba3 (Accession #AY536893), Cry36Aa1 (Accession #AAK64558), Cry37Aa1 (Accession #AAF76376), Cry38Aa1 (Accession #AAK64559), Cry39Aa1 (Accession #BAB72016), Cry40Aa1 (Accession #BAB72018), Cry40Ba1 (Accession #BAC77648), Cry40Ca1 (Accession #EU381045), Cry40Da1 (Accession #EU596478), Cry41Aa1 (Accession #AB116649), Cry41Ab1 (Accession #AB116651), Cry42Aa1 (Accession #AB116652), Cry43Aa1 (Accession #AB115422), Cry43Aa2 (Accession #AB176668), Cry43Ba1 (Accession #AB115422), Cry43-like (Accession #AB115422), Cry44Aa (Accession #BAD08532), Cry45Aa (Accession #BAD22577), Cry46Aa (Accession #BAC79010), Cry46Aa2 (Accession #BAG68906), Cry46Ab (Accession #BAD35170), Cry47Aa (Accession #AY950229), Cry48Aa (Accession #AJ841948), Cry48Aa2 (Accession #AM237205), Cry48Aa3 (Accession #AM237206), Cry48Ab (Accession #AM237207), Cry48Ab2 (Accession #AM237208), Cry49Aa (Accession #AJ841948), Cry49Aa2 (Accession #AM237201), Cry49Aa3 (Accession #AM237203), Cry49Aa4 (Accession #AM237204), Cry49Ab1 (Accession #AM237202), Cry50Aa1 (Accession #AB253419), Cry51Aa1 (Accession #DQ836184), Cry52Aa1 (Accession #EF613489), Cry53Aa1 (Accession #EF633476), Cry54Aa1 (Accession #EU339367), Cry55Aa1 (Accession #EU121521), Cry55Aa2 (Accession #AAE33526).

[0131] Examples of delta-endotoxins also include but are not limited to Cry1A proteins of U.S. Pat. Nos. 5,880,275 and 7,858,849; a DIG-3 or DIG-11 toxin (N-terminal deletion of alpha-helix 1 and/or alpha-helix 2 variants of Cry proteins such as Cry1A) of U.S. Pat. Nos. 8,304,604 and 8,304,605, Cry1B of U.S. patent application Ser. No. 10/525,318; Cry1C of U.S. Pat. No. 6,033,874; Cry1F of U.S. Pat. Nos. 5,188,960, 6,218,188; Cry1A/F chimeras of U.S. Pat. Nos. 7,070,982; 6,962,705 and 6,713,063); a Cry2 protein such as Cry2Ab protein of U.S. Pat. No. 7,064,249); a Cry3A protein including but not limited to an engineered hybrid insecticidal protein (eHIP) created by fusing unique combinations of variable regions and conserved blocks of at least two different Cry proteins (U.S. Patent Application Publication Number 2010/0017914); a Cry4 protein; a Cry5 protein; a Cry6 protein; Cry8 proteins of U.S. Pat. Nos. 7,329,736, 7,449,552, 7,803,943, 7,476,781, 7,105,332, 7,378,499 and 7,462,760; a Cry9 protein such as such as members of the Cry9A, Cry9B, Cry9C, Cry9D, Cry9E, and Cry9F families; a Cry15 protein of Naimov, et al., (2008) Applied and Environmental Microbiology 74:7145-7151; a Cry22, a Cry34Ab1 protein of U.S. Pat. Nos. 6,127,180, 6,624,145 and 6,340,593; a CryET33 and CryET34 protein of U.S. Pat. Nos. 6,248,535, 6,326,351, 6,399,330, 6,949,626, 7,385,107 and 7,504,229; a CryET33 and CryET34 homologs of US Patent Publication Number 2006/0191034, 2012/0278954, and PCT Publication Number WO 2012/139004; a Cry35Ab1 protein of U.S. Pat. Nos. 6,083,499, 6,548,291 and 6,340,593; a Cry46 protein, a Cry 51 protein, a Cry binary toxin; a TIC901 or related toxin; TIC807 of US 2008/0295207; ET29, ET37, TIC809, TIC810, TIC812, TIC127, TIC128 of PCT US 2006/033867; AXMI-027, AXMI-036, and AXMI-038 of U.S. Pat. No. 8,236,757; AXMI-031, AXMI-039, AXMI-040, AXMI-049 of U.S. Pat. No. 7,923,602; AXMI-018, AXMI-020, and AXMI-021 of WO 2006/083891; AXMI-010 of WO 2005/038032; AXMI-003 of WO 2005/021585; AXMI-008 of US 2004/0250311; AXMI-006 of US 2004/0216186; AXMI-007 of US 2004/0210965; AXMI-009 of US 2004/0210964; AXMI-014 of US 2004/0197917; AXMI-004 of US 2004/0197916; AXMI-028 and AXMI-029 of WO 2006/119457; AXMI-007, AXMI-008, AXMI-0080rf2, AXMI-009, AXMI-014 and AXMI-004 of WO 2004/074462; AXMI-150 of U.S. Pat. No. 8,084,416; AXMI-205 of US20110023184; AXMI-011, AXMI-012, AXMI-013, AXMI-015, AXMI-019, AXMI-044, AXMI-037, AXMI-043, AXMI-033, AXMI-034, AXMI-022, AXMI-023, AXMI-041, AXMI-063, and AXMI-064 of US 2011/0263488; AXMI-R1 and related proteins of US 2010/0197592; AXMI221Z, AXMI222z, AXMI223z, AXMI224z and AXMI225z of WO 2011/103248; AXMI218, AXMI219, AXMI220, AXMI226, AXMI227, AXMI228, AXMI229, AXMI230, and AXMI231 of WO11/103,247; AXMI-115, AXMI-113, AXMI-005, AXMI-163 and AXMI-184 of U.S. Pat. No. 8,334,431; AXMI-001, AXMI-002, AXMI-030, AXMI-035, and AXMI-045 of US 2010/0298211; AXMI-066 and AXMI-076 of US20090144852; AXMI128, AXMI130, AXMI131, AXMI133, AXMI140, AXMI141, AXMI142, AXMI143, AXMI144, AXMI146, AXMI148, AXMI149, AXMI152, AXMI153, AXMI154, AXMI155, AXMI156, AXMI157, AXMI158, AXMI162, AXMI165, AXMI166, AXMI167, AXMI168, AXMI169, AXMI170, AXMI171, AXMI172, AXMI173, AXMI174, AXMI175, AXMI176, AXMI177, AXMI178, AXMI179, AXMI180, AXMI181, AXMI182, AXMI185, AXMI186, AXMI187, AXMI188, AXMI189 of U.S. Pat. No. 8,318,900; AXMI079, AXMI080, AXMI081, AXMI082, AXMI091, AXMI092, AXMI096, AXMI097, AXMI098, AXMI099, AXMI100, AXMI101, AXMI102, AXMI103, AXMI104, AXMI107, AXMI108, AXMI109, AXMI110, AXMI111, AXMI112, AXMI114, AXMI116, AXMI117, AXMI118, AXMI119, AXMI120, AXMI121, AXMI122, AXMI123, AXMI124, AXMI1257, AXMI1268, AXMI127, AXMI129, AXMI164, AXMI151, AXMI161, AXMI183, AXMI132, AXMI138, AXMI137 of US 2010/0005543; Cry proteins such as Cry1A and Cry3A having modified proteolytic sites of U.S. Pat. No. 8,319,019; and a Cry1Ac, Cry2Aa and Cry1Ca toxin protein from Bacillus thuringiensis strain VBTS 2528 of US Patent Application Publication Number 2011/0064710. Other Cry proteins are well known to one skilled in the art (see, Crickmore, et al., “Bacillus thuringiensis toxin nomenclature” (2011), at lifesci.sussex.ac.uk/home/Neil_Crickmore/Bt/which can be accessed on the world-wide web using the “www” prefix). The insecticidal activity of Cry proteins is well known to one skilled in the art (for review, see, van Frannkenhuyzen, (2009) J. Invert. Path. 101:1-16). The use of Cry proteins as transgenic plant traits is well known to one skilled in the art and Cry-transgenic plants including but not limited to Cry1Ac, Cry1Ac+Cry2Ab, Cry1Ab, Cry1A.105, Cry1F, Cry1Fa2, Cry1F+Cry1Ac, Cry2Ab, Cry3A, mCry3A, Cry3Bb1, Cry34Ab1, Cry35Ab1, Vip3A, mCry3A, Cry9c and CBI-Bt have received regulatory approval (see, Sanahuja, (2011) Plant Biotech Journal 9:283-300 and the CERA (2010) GM Crop Database Center for Environmental Risk Assessment (CERA), ILSI Research Foundation, Washington D.C. at cera-gmc.org/index.php?action=gm_crop_database which can be accessed on the world-wide web using the “www” prefix). Pesticidal proteins also include insecticidal lipases including lipid acyl hydrolases of U.S. Pat. No. 7,491,869, and cholesterol oxidases such as from Streptomyces (Purcell et al. (1993) Biochem Biophys Res Commun 15:1406-1413). Pesticidal proteins also include VIP (vegetative insecticidal proteins) toxins of U.S. Pat. Nos. 5,877,012, 6,107,279, 6,137,033, 7,244,820, 7,615,686, and 8,237,020, and the like. Other VIP proteins are well known to one skilled in the art (see, lifesci.sussex.ac.uk/home/Neil_Crickmore/Bt/vip.html which can be accessed on the world-wide web using the “www” prefix). Pesticidal proteins also include toxin complex (TC) proteins, obtainable from organisms such as Xenorhabdus, Photorhabdus and Paenibacillus (see, U.S. Pat. Nos. 7,491,698 and 8,084,418). Some TC proteins have “stand alone” insecticidal activity and other TC proteins enhance the activity of the stand-alone toxins produced by the same given organism. The toxicity of a “stand-alone” TC protein (from Photorhabdus, Xenorhabdus or Paenibacillus, for example) can be enhanced by one or more TC protein “potentiators” derived from a source organism of a different genus. There are three main types of TC proteins. As referred to herein, Class A proteins (“Protein A”) are stand-alone toxins. Class B proteins (“Protein B”) and Class C proteins (“Protein C”) enhance the toxicity of Class A proteins. Examples of Class A proteins are TcbA, TcdA, XptA1 and XptA2. Examples of Class B proteins are TcaC, TcdB, XptB1Xb and XptC1Wi. Examples of Class C proteins are TccC, XptC1Xb and XptB1Wi. Pesticidal proteins also include spider, snake and scorpion venom proteins. Examples of spider venom peptides include but are not limited to lycotoxin-1 peptides and mutants thereof (U.S. Pat. No. 8,334,366).

[0132] (C) A polynucleotide encoding an insect-specific hormone or pheromone such as an ecdysteroid and juvenile hormone, a variant thereof, a mimetic based thereon or an antagonist or agonist thereof. See, for example, the disclosure by Hammock, et al., (1990) Nature 344:458, of baculovirus expression of cloned juvenile hormone esterase, an inactivator of juvenile hormone.

[0133] (D) A polynucleotide encoding an insect-specific peptide which, upon expression, disrupts the physiology of the affected pest. For example, see the disclosures of, Regan, (1994) J. Biol. Chem. 269:9 (expression cloning yields DNA coding for insect diuretic hormone receptor); Pratt, et al., (1989) Biochem. Biophys. Res. Comm. 163:1243 (an allostatin is identified in Diploptera puntata); Chattopadhyay, et al., (2004) Critical Reviews in Microbiology 30(1):33-54; Zjawiony, (2004) J Nat Prod 67(2):300-310; Carlini and Grossi-de-Sa, (2002) Toxicon 40(11):1515-1539; Ussuf, et al., (2001) Curr Sci. 80(7):847-853 and Vasconcelos and Oliveira, (2004) Toxicon 44(4):385-403. See also, U.S. Pat. No. 5,266,317 to Tomalski, et al., who disclose genes encoding insect-specific toxins.

[0134] (E) A polynucleotide encoding an enzyme responsible for a hyperaccumulation of a monoterpene, a sesquiterpene, a steroid, hydroxamic acid, a phenylpropanoid derivative or another non-protein molecule with insecticidal activity.

[0135] (F) A polynucleotide encoding an enzyme involved in the modification, including the post-translational modification, of a biologically active molecule; for example, a glycolytic enzyme, a proteolytic enzyme, a lipolytic enzyme, a nuclease, a cyclase, a transaminase, an esterase, a hydrolase, a phosphatase, a kinase, a phosphorylase, a polymerase, an elastase, a chitinase and a glucanase, whether natural or synthetic. See, PCT Application WO 1993/02197 in the name of Scott, et al., which discloses the nucleotide sequence of a callase gene. DNA molecules which contain chitinase-encoding sequences can be obtained, for example, from the ATCC under Accession Numbers 39637 and 67152. See also, Kramer, et al., (1993) Insect Biochem. Molec. Biol. 23:691, who teach the nucleotide sequence of a cDNA encoding tobacco hookworm chitinase and Kawalleck, et al., (1993) Plant Molec. Biol. 21:673, who provide the nucleotide sequence of the parsley ubi4-2 polyubiquitin gene, and U.S. Pat. Nos. 6,563,020; 7,145,060 and 7,087,810.

[0136] (G) A polynucleotide encoding a molecule that stimulates signal transduction. For example, see the disclosure by Botella, et al., (1994) Plant Molec. Biol. 24:757, of nucleotide sequences for mung bean calmodulin cDNA clones, and Griess, et al., (1994) Plant Physiol. 104:1467, who provide the nucleotide sequence of a maize calmodulin cDNA clone.

[0137] (H) A polynucleotide encoding a hydrophobic moment peptide. See, PCT Application WO 1995/16776 and U.S. Pat. No. 5,580,852 disclosure of peptide derivatives of Tachyplesin which inhibit fungal plant pathogens) and PCT Application WO 1995/18855 and U.S. Pat. No. 5,607,914 (teaches synthetic antimicrobial peptides that confer disease resistance).

[0138] (I) A polynucleotide encoding a membrane permease, a channel former or a channel blocker. For example, see the disclosure by Jaynes, et al., (1993) Plant Sci. 89:43, of heterologous expression of a cecropin-beta lytic peptide analog to render transgenic tobacco plants resistant to Pseudomonas solanacearum.

[0139] (J) A gene encoding a viral-invasive protein or a complex toxin derived therefrom. For example, the accumulation of viral coat proteins in transformed plant cells imparts resistance to viral infection and/or disease development effected by the virus from which the coat protein gene is derived, as well as by related viruses. See, Beachy, et al., (1990) Ann. Rev. Phytopathol. 28:451. Coat protein-mediated resistance has been conferred upon transformed plants against alfalfa mosaic virus, cucumber mosaic virus, tobacco streak virus, potato virus X, potato virus Y, tobacco etch virus, tobacco rattle virus and tobacco mosaic virus. Id.

[0140] (K) A gene encoding an insect-specific antibody or an immunotoxin derived therefrom. Thus, an antibody targeted to a critical metabolic function in the insect gut would inactivate an affected enzyme, killing the insect. Cf. Taylor, et al., Abstract #497, SEVENTH INT'L SYMPOSIUM ON MOLECULAR PLANT-MICROBE INTERACTIONS (Edinburgh, Scotland, 1994) (enzymatic inactivation in transgenic tobacco via production of single-chain antibody fragments).

[0141] (L) A gene encoding a virus-specific antibody. See, for example, Tavladoraki, et al., (1993) Nature 366:469, who show that transgenic plants expressing recombinant antibody genes are protected from virus attack.

[0142] (M) A polynucleotide encoding a developmental-arrestive protein produced in nature by a pathogen or a parasite. Thus, fungal endo alpha-1,4-D-polygalacturonases facilitate fungal colonization and plant nutrient release by solubilizing plant cell wall homo-alpha-1,4-D-galacturonase. See, Lamb, et al., (1992) Bio/Technology 10:1436. The cloning and characterization of a gene which encodes a bean endopolygalacturonase-inhibiting protein is described by Toubart, et al., (1992) Plant J. 2:367.

[0143] (N) A polynucleotide encoding a developmental-arrestive protein produced in nature by a plant. For example, Logemann, et al., (1992) Bio/Technology 10:305, have shown that transgenic plants expressing the barley ribosome-inactivating gene have an increased resistance to fungal disease.

[0144] (O) Genes involved in the Systemic Acquired Resistance (SAR) Response and/or the pathogenesis related genes. Briggs, (1995) Current Biology 5(2), Pieterse and Van Loon, (2004) Curr. Opin. Plant Bio. 7(4):456-64 and Somssich, (2003) Cell 113(7):815-6.

[0145] (P) Antifungal genes (Cornelissen and Melchers, (1993) Pl. Physiol. 101:709-712 and Parijs, et al., (1991) Planta 183:258-264 and Bushnell, et al., (1998) Can. J. of Plant Path. 20(2):137-149. Also see, U.S. patent application Ser. Nos. 09/950,933; 11/619,645; 11/657,710; 11/748,994; 11/774,121 and U.S. Pat. Nos. 6,891,085 and 7,306,946. LysM Receptor-like kinases for the perception of chitin fragments as a first step in plant defense response against fungal pathogens (US 2012/0110696).

[0146] (Q) Detoxification genes, such as for fumonisin, beauvericin, moniliformin and zearalenone and their structurally related derivatives. For example, see, U.S. Pat. Nos. 5,716,820; 5,792,931; 5,798,255; 5,846,812; 6,083,736; 6,538,177; 6,388,171 and 6,812,380.

[0147] (R) A polynucleotide encoding a Cystatin and cysteine proteinase inhibitors. See, U.S. Pat. No. 7,205,453.

[0148] (S) Defensin genes. See, WO 2003/000863 and U.S. Pat. Nos. 6,911,577; 6,855,865; 6,777,592 and 7,238,781.

[0149] (T) Genes conferring resistance to nematodes. See, e.g., PCT Application WO 1996/30517; PCT Application WO 1993/19181, WO 2003/033651 and Urwin, et al., (1998) Planta 204:472-479, Williamson, (1999) Curr Opin Plant Bio. 2(4):327-31; U.S. Pat. Nos. 6,284,948 and 7,301,069 and miR164 genes (WO 2012/058266).

[0150] (U) Genes that confer resistance to Phytophthora Root Rot, such as the Rps 1, Rps 1-a, Rps 1-b, Rps 1-c, Rps 1-d, Rps 1-e, Rps 1-k, Rps 2, Rps 3-a, Rps 3-b, Rps 3-c, Rps 4, Rps 5, Rps 6, Rps 7 and other Rps genes. See, for example, Shoemaker, et al., Phytophthora Root Rot Resistance Gene Mapping in Soybean, Plant Genome IV Conference, San Diego, Calif. (1995).

[0151] (V) Genes that confer resistance to Brown Stem Rot, such as described in U.S. Pat. No. 5,689,035 and incorporated by reference for this purpose.

[0152] (W) Genes that confer resistance to Colletotrichum, such as described in US Patent Application Publication US 2009/0035765 and incorporated by reference for this purpose. This includes the Reg locus that may be utilized as a single locus conversion.

[0153] ii. Transgenes that Confer Resistance to a Herbicide.

[0154] (A) A polynucleotide encoding resistance to a herbicide that inhibits the growing point or meristem, such as an imidazolinone or a sulfonylurea. Exemplary genes in this category code for mutant ALS and AHAS enzyme as described, for example, by Lee, et al., (1988) EMBO J. 7:1241 and Miki, et al., (1990) Theor. Appl. Genet. 80:449, respectively. See also, U.S. Pat. Nos. 5,605,011; 5,013,659; 5,141,870; 5,767,361; 5,731,180; 5,304,732; 4,761,373; 5,331,107; 5,928,937 and 5,378,824; U.S. patent application Ser. No. 11/683,737 and International Publication WO 1996/33270.

[0155] (B) A polynucleotide encoding a protein for resistance to Glyphosate (resistance imparted by mutant 5-enolpyruvl-3-phosphikimate synthase (EPSP) and aroA genes, respectively) and other phosphono compounds such as glufosinate (phosphinothricin acetyl transferase (PAT) and Streptomyces hygroscopicus phosphinothricin acetyl transferase (bar) genes), and pyridinoxy or phenoxy proprionic acids and cyclohexones (ACCase inhibitor-encoding genes). See, for example, U.S. Pat. No. 4,940,835 to Shah, et al., which discloses the nucleotide sequence of a form of EPSPS which can confer glyphosate resistance. U.S. Pat. No. 5,627,061 to Barry, et al., also describes genes encoding EPSPS enzymes. See also, U.S. Pat. Nos. 6,566,587; 6,338,961; 6,248,876 B1; 6,040,497; 5,804,425; 5,633,435; 5,145,783; 4,971,908; 5,312,910; 5,188,642; 5,094,945, 4,940,835; 5,866,775; 6,225,114 B1; 6,130,366; 5,310,667; 4,535,060; 4,769,061; 5,633,448; 5,510,471; Re. 36,449; RE 37,287 E and 5,491,288 and International Publications EP 1173580; WO 2001/66704; EP 1173581 and EP 1173582, which are incorporated herein by reference for this purpose.

[0156] Glyphosate resistance is also imparted to plants that express a gene encoding a glyphosate oxido-reductase enzyme as described more fully in U.S. Pat. Nos. 5,776,760 and 5,463,175, which are incorporated herein by reference for this purpose. In addition glyphosate resistance can be imparted to plants by the over expression of genes encoding glyphosate N-acetyltransferase. See, for example, U.S. Pat. Nos. 7,462,481; 7,405,074 and US Patent Application Publication Number US 2008/0234130. A DNA molecule encoding a mutant aroA gene can be obtained under ATCC Accession Number 39256, and the nucleotide sequence of the mutant gene is disclosed in U.S. Pat. No. 4,769,061 to Comai. EP Application Number 0 333 033 to Kumada, et al., and U.S. Pat. No. 4,975,374 to Goodman, et al., disclose nucleotide sequences of glutamine synthetase genes which confer resistance to herbicides such as L-phosphinothricin. The nucleotide sequence of a phosphinothricin-acetyl-transferase gene is provided in EP Application Numbers 0 242 246 and 0 242 236 to Leemans, et al.; De Greef, et al., (1989) Bio/Technology 7:61, describe the production of transgenic plants that express chimeric bar genes coding for phosphinothricin acetyl transferase activity. See also, U.S. Pat. Nos. 5,969,213; 5,489,520; 5,550,318; 5,874,265; 5,919,675; 5,561,236; 5,648,477; 5,646,024; 6,177,616 B1 and 5,879,903, which are incorporated herein by reference for this purpose. Exemplary genes conferring resistance to phenoxy proprionic acids and cyclohexones, such as sethoxydim and haloxyfop, are the Acc1-S1, Acc1-S2 and Acc1-S3 genes described by Marshall, et al., (1992) Theor. Appl. Genet. 83:435.

[0157] (C) A polynucleotide encoding a protein for resistance to herbicide that inhibits photosynthesis, such as a triazine (psbA and gs+ genes) and a benzonitrile (nitrilase gene). Przibilla, et al., (1991) Plant Cell 3:169, describe the transformation of Chlamydomonas with plasmids encoding mutant psbA genes. Nucleotide sequences for nitrilase genes are disclosed in U.S. Pat. No. 4,810,648 to Stalker and DNA molecules containing these genes are available under ATCC Accession Numbers 53435, 67441 and 67442. Cloning and expression of DNA coding for a glutathione S-transferase is described by Hayes, et al., (1992) Biochem. J. 285:173.

[0158] (D) A polynucleotide encoding a protein for resistance to Acetohydroxy acid synthase, which has been found to make plants that express this enzyme resistant to multiple types of herbicides, has been introduced into a variety of plants (see, e.g., Hattori, et al., (1995) Mol Gen Genet. 246:419). Other genes that confer resistance to herbicides include: a gene encoding a chimeric protein of rat cytochrome P4507A1 and yeast NADPH-cytochrome P450 oxidoreductase (Shiota, et al., (1994) Plant Physiol 106:17), genes for glutathione reductase and superoxide dismutase (Aono, et al., (1995) Plant Cell Physiol 36:1687) and genes for various phosphotransferases (Datta, et al., (1992) Plant Mol Biol 20:619).

[0159] (E) A polynucleotide encoding resistance to a herbicide targeting Protoporphyrinogen oxidase (protox) which is necessary for the production of chlorophyll. The protox enzyme serves as the target for a variety of herbicidal compounds. These herbicides also inhibit growth of all the different species of plants present, causing their total destruction. The development of plants containing altered protox activity which are resistant to these herbicides are described in U.S. Pat. Nos. 6,288,306 B1; 6,282,837 B1 and 5,767,373 and International Publication WO 2001/12825.

[0160] (F) The aad-1 gene (originally from Sphingobium herbicidovorans) encodes the aryloxyalkanoate dioxygenase (AAD-1) protein. The trait confers tolerance to 2,4-dichlorophenoxyacetic acid and aryloxyphenoxypropionate (commonly referred to as “fop” herbicides such as quizalofop) herbicides. The aad-1 gene, itself, for herbicide tolerance in plants was first disclosed in WO 2005/107437 (see also, US 2009/0093366). The aad-12 gene, derived from Delftia acidovorans, which encodes the aryloxyalkanoate dioxygenase (AAD-12) protein that confers tolerance to 2,4-dichlorophenoxyacetic acid and pyridyloxyacetate herbicides by deactivating several herbicides with an aryloxyalkanoate moiety, including phenoxy auxin (e.g., 2,4-D, MCPA), as well as pyridyloxy auxins (e.g., fluoroxypyr, triclopyr).

[0161] (G) A polynucleotide encoding a herbicide resistant dicamba monooxygenase disclosed in US Patent Application Publication 2003/0135879 for imparting dicamba tolerance.

[0162] (H) A polynucleotide molecule encoding bromoxynil nitrilase (Bxn) disclosed in U.S. Pat. No. 4,810,648 for imparting bromoxynil tolerance.

[0163] (I) A polynucleotide molecule encoding phytoene (crtl) described in Misawa, et al., (1993) Plant J. 4:833-840 and in Misawa, et al., (1994) Plant J. 6:481-489 for norflurazon tolerance.

[0164] iii. Transgenes that Confer or Contribute to an Altered Grain Characteristic

[0165] (A) Altered fatty acids, for example, by (1) Down-regulation of stearoyl-ACP to increase stearic acid content of the plant. See, Knultzon, et al., (1992) Proc. Natl. Acad. Sci. USA 89:2624 and WO 1999/64579 (Genes to Alter Lipid Profiles in Corn); (2) Elevating oleic acid via FAD-2 gene modification and/or decreasing linolenic acid via FAD-3 gene modification (see, U.S. Pat. Nos. 6,063,947; 6,323,392; 6,372,965 and WO 1993/11245); (3) Altering conjugated linolenic or linoleic acid content, such as in WO 2001/12800; (4) Altering LEC1, AGP, Dek1, Superal1, mil ps, various Ipa genes such as Ipa1, Ipa3, hpt or hggt. For example, see, WO 2002/42424, WO 1998/22604, WO 2003/011015, WO 2002/057439, WO 2003/011015, U.S. Pat. Nos. 6,423,886, 6,197,561, 6,825,397 and US Patent Application Publication Numbers US 2003/0079247, US 2003/0204870 and Rivera-Madrid, et al., (1995) Proc. Natl. Acad. Sci. 92:5620-5624; (5) Genes encoding delta-8 desaturase for making long-chain polyunsaturated fatty acids (U.S. Pat. Nos. 8,058,571 and 8,338,152), delta-9 desaturase for lowering saturated fats (U.S. Pat. No. 8,063,269), Primula .DELTA.6-desaturase for improving omega-3 fatty acid profiles; (6) Isolated nucleic acids and proteins associated with lipid and sugar metabolism regulation, in particular, lipid metabolism protein (LMP) used in methods of producing transgenic plants and modulating levels of seed storage compounds including lipids, fatty acids, starches or seed storage proteins and use in methods of modulating the seed size, seed number, seed weights, root length and leaf size of plants (EP 2404499); (7) Altering expression of a High-Level Expression of Sugar-Inducible 2 (HSI2) protein in the plant to increase or decrease expression of HSI2 in the plant. Increasing expression of HSI2 increases oil content while decreasing expression of HSI2 decreases abscisic acid sensitivity and/or increases drought resistance (US Patent Application Publication Number 2012/0066794); (8) Expression of cytochrome b5 (Cb5) alone or with FAD2 to modulate oil content in plant seed, particularly to increase the levels of omega-3 fatty acids and improve the ratio of omega-6 to omega-3 fatty acids (US Patent Application Publication Number 2011/0191904); and (9) Nucleic acid molecules encoding wrinkled1-like polypeptides for modulating sugar metabolism (U.S. Pat. No. 8,217,223).

[0166] (B) Altered phosphorus content, for example, by the (1) introduction of a phytase-encoding gene would enhance breakdown of phytate, adding more free phosphate to the transformed plant. For example, see, Van Hartingsveldt, et al., (1993) Gene 127:87, for a disclosure of the nucleotide sequence of an Aspergillus niger phytase gene; and (2) modulating a gene that reduces phytate content. In maize, this, for example, could be accomplished, by cloning and then re-introducing DNA associated with one or more of the alleles, such as the LPA alleles, identified in maize mutants characterized by low levels of phytic acid, such as in WO 2005/113778 and/or by altering inositol kinase activity as in WO 2002/059324, US Patent Application Publication Number 2003/0009011, WO 2003/027243, US Patent Application Publication Number 2003/0079247, WO 1999/05298, U.S. Pat. No. 6,197,561, U.S. Pat. No. 6,291,224, U.S. Pat. No. 6,391,348, WO 2002/059324, US Patent Application Publication Number 2003/0079247, WO 1998/45448, WO 1999/55882, WO 2001/04147.

[0167] (C) Altered carbohydrates affected, for example, by altering a gene for an enzyme that affects the branching pattern of starch or, a gene altering thioredoxin such as NTR and/or TRX (see, U.S. Pat. No. 6,531,648. which is incorporated by reference for this purpose) and/or a gamma zein knock out or mutant such as cs27 or TUSC27 or en27 (see, U.S. Pat. No. 6,858,778 and US Patent Application Publication Number 2005/0160488, US Patent Application Publication Number 2005/0204418, which are incorporated by reference for this purpose). See, Shiroza, et al., (1988) J. Bacteriol. 170:810 (nucleotide sequence of Streptococcus mutant fructosyltransferase gene), Steinmetz, et al., (1985) Mol. Gen. Genet. 200:220 (nucleotide sequence of Bacillus subtilis levansucrase gene), Pen, et al., (1992) Bio/Technology 10:292 (production of transgenic plants that express Bacillus licheniformis alpha-amylase), Elliot, et al., (1993) Plant Molec. Biol. 21:515 (nucleotide sequences of tomato invertase genes), Sogaard, et al., (1993) J. Biol. Chem. 268:22480 (site-directed mutagenesis of barley alpha-amylase gene) and Fisher, et al., (1993) Plant Physiol. 102:1045 (maize endosperm starch branching enzyme II), WO 1999/10498 (improved digestibility and/or starch extraction through modification of UDP-D-xylose 4-epimerase, Fragile 1 and 2, Ref1, HCHL, C4H), U.S. Pat. No. 6,232,529 (method of producing high oil seed by modification of starch levels (AGP)). The fatty acid modification genes mentioned herein may also be used to affect starch content and/or composition through the interrelationship of the starch and oil pathways.

[0168] (D) Altered antioxidant content or composition, such as alteration of tocopherol or tocotrienols. For example, see, U.S. Pat. No. 6,787,683, US Patent Application Publication Number 2004/0034886 and WO 2000/68393 involving the manipulation of antioxidant levels and WO 2003/082899 through alteration of a homogentisate geranyl geranyl transferase (hggt).

[0169] (E) Altered essential seed amino acids. For example, see, U.S. Pat. No. 6,127,600 (method of increasing accumulation of essential amino acids in seeds), U.S. Pat. No. 6,080,913 (binary methods of increasing accumulation of essential amino acids in seeds), U.S. Pat. No. 5,990,389 (high lysine), WO 1999/40209 (alteration of amino acid compositions in seeds), WO 1999/29882 (methods for altering amino acid content of proteins), U.S. Pat. No. 5,850,016 (alteration of amino acid compositions in seeds), WO 1998/20133 (proteins with enhanced levels of essential amino acids), U.S. Pat. No. 5,885,802 (high methionine), U.S. Pat. No. 5,885,801 (high threonine), U.S. Pat. No. 6,664,445 (plant amino acid biosynthetic enzymes), U.S. Pat. No. 6,459,019 (increased lysine and threonine), U.S. Pat. No. 6,441,274 (plant tryptophan synthase beta subunit), U.S. Pat. No. 6,346,403 (methionine metabolic enzymes), U.S. Pat. No. 5,939,599 (high sulfur), U.S. Pat. No. 5,912,414 (increased methionine), WO 1998/56935 (plant amino acid biosynthetic enzymes), WO 1998/45458 (engineered seed protein having higher percentage of essential amino acids), WO 1998/42831 (increased lysine), U.S. Pat. No. 5,633,436 (increasing sulfur amino acid content), U.S. Pat. No. 5,559,223 (synthetic storage proteins with defined structure containing programmable levels of essential amino acids for improvement of the nutritional value of plants), WO 1996/01905 (increased threonine), WO 1995/15392 (increased lysine), US Patent Application Publication Number 2003/0163838, US Patent Application Publication Number 2003/0150014, US Patent Application Publication Number 2004/0068767, U.S. Pat. No. 6,803,498, WO 2001/79516.

[0170] iv. Genes that Control Male-Sterility

[0171] There are several methods of conferring genetic male sterility available, such as multiple mutant genes at separate locations within the genome that confer male sterility, as disclosed in U.S. Pat. Nos. 4,654,465 and 4,727,219 to Brar, et al., and chromosomal translocations as described by Patterson in U.S. Pat. Nos. 3,861,709 and 3,710,511. In addition to these methods, Albertsen, et al., U.S. Pat. No. 5,432,068, describe a system of nuclear male sterility which includes: identifying a gene which is critical to male fertility; silencing this native gene which is critical to male fertility; removing the native promoter from the essential male fertility gene and replacing it with an inducible promoter; inserting this genetically engineered gene back into the plant; and thus creating a plant that is male sterile because the inducible promoter is not “on” resulting in the male fertility gene not being transcribed. Fertility is restored by inducing or turning “on”, the promoter, which in turn allows the gene that confers male fertility to be transcribed. Non-limiting examples include: (A) Introduction of a deacetylase gene under the control of a tapetum-specific promoter and with the application of the chemical N-Ac-PPT (WO 2001/29237); (B) Introduction of various stamen-specific promoters (WO 1992/13956, WO 1992/13957); and (C) Introduction of the barnase and the barstar gene (Paul, et al., (1992) Plant Mol. Biol. 19:611-622). For additional examples of nuclear male and female sterility systems and genes, see also, U.S. Pat. Nos. 5,859,341; 6,297,426; 5,478,369; 5,824,524; 5,850,014 and 6,265,640, all of which are hereby incorporated by reference.

[0172] v. Genes that Create a Site for Site Specific DNA Integration.

[0173] This includes the introduction of FRT sites that may be used in the FLP/FRT system and/or Lox sites that may be used in the Cre/Loxp system. For example, see, Lyznik, et al., (2003) Plant Cell Rep 21:925-932 and WO 1999/25821, which are hereby incorporated by reference. Other systems that may be used include the Gln recombinase of phage Mu (Maeser, et al., (1991) Vicki Chandler, The Maize Handbook ch. 118 (Springer-Verlag 1994), the Pin recombinase of E. coli (Enomoto, et al., 1983) and the R/RS system of the pSRi plasmid (Araki, et al., 1992).

[0174] vi. Genes that Affect Abiotic Stress Resistance

[0175] Including but not limited to flowering, ear and seed development, enhancement of nitrogen utilization efficiency, altered nitrogen responsiveness, drought resistance or tolerance, cold resistance or tolerance and salt resistance or tolerance and increased yield under stress. Non-limiting examples include: (A) For example, see: WO 2000/73475 where water use efficiency is altered through alteration of malate; U.S. Pat. Nos. 5,892,009, 5,965,705, 5,929,305, 5,891,859, 6,417,428, 6,664,446, 6,706,866, 6,717,034, 6,801,104, WO 2000/060089, WO 2001/026459, WO 2001/035725, WO 2001/034726, WO 2001/035727, WO 2001/036444, WO 2001/036597, WO 2001/036598, WO 2002/015675, WO 2002/017430, WO 2002/077185, WO 2002/079403, WO 2003/013227, WO 2003/013228, WO 2003/014327, WO 2004/031349, WO 2004/076638, WO 199809521; (B) WO 199938977 describing genes, including CBF genes and transcription factors effective in mitigating the negative effects of freezing, high salinity and drought on plants, as well as conferring other positive effects on plant phenotype; (C) US Patent Application Publication Number 2004/0148654 and WO 2001/36596 where abscisic acid is altered in plants resulting in improved plant phenotype such as increased yield and/or increased tolerance to abiotic stress; (D) WO 2000/006341, WO 2004/090143, U.S. Pat. Nos. 7,531,723 and 6,992,237 where cytokinin expression is modified resulting in plants with increased stress tolerance, such as drought tolerance, and/or increased yield. Also see, WO 2002/02776, WO 2003/052063, JP 2002/281975, U.S. Pat. No. 6,084,153, WO 2001/64898, U.S. Pat. No. 6,177,275 and U.S. Pat. No. 6,107,547 (enhancement of nitrogen utilization and altered nitrogen responsiveness); (E) For ethylene alteration, see, US Patent Application Publication Number 2004/0128719, US Patent Application Publication Number 2003/0166197 and WO 2000/32761; (F) For plant transcription factors or transcriptional regulators of abiotic stress, see, e.g., US Patent Application Publication Number 2004/0098764 or US Patent Application Publication Number 2004/0078852; (G) Genes that increase expression of vacuolar pyrophosphatase such as AVP1 (U.S. Pat. No. 8,058,515) for increased yield; nucleic acid encoding a HSFA4 or a HSFA5 (Heat Shock Factor of the class A4 or A5) polypeptides, an oligopeptide transporter protein (OPT4-like) polypeptide; a plastochron2-like (PLA2-like) polypeptide or a Wuschel related homeobox 1-like (WOX1-like) polypeptide (U. Patent Application Publication Number US 2011/0283420); (H) Down regulation of polynucleotides encoding poly (ADP-ribose) polymerase (PARP) proteins to modulate programmed cell death (U.S. Pat. No. 8,058,510) for increased vigor; (I) Polynucleotide encoding DTP21 polypeptides for conferring drought resistance (US Patent Application Publication Number US 2011/0277181); (J) Nucleotide sequences encoding ACC Synthase 3 (ACS3) proteins for modulating development, modulating response to stress, and modulating stress tolerance (US Patent Application Publication Number US 2010/0287669); (K) Polynucleotides that encode proteins that confer a drought tolerance phenotype (DTP) for conferring drought resistance (WO 2012/058528); (L) Tocopherol cyclase (TC) genes for conferring drought and salt tolerance (US Patent Application Publication Number 2012/0272352); (M) CAAX amino terminal family proteins for stress tolerance (U.S. Pat. No. 8,338,661); (N) Mutations in the SAL1 encoding gene have increased stress tolerance, including increased drought resistant (US Patent Application Publication Number 2010/0257633); (0) Expression of a nucleic acid sequence encoding a polypeptide selected from the group consisting of: GRF polypeptide, RAA1-like polypeptide, SYR polypeptide, ARKL polypeptide, and YTP polypeptide increasing yield-related traits (US Patent Application Publication Number 2011/0061133); and (P) Modulating expression in a plant of a nucleic acid encoding a Class III Trehalose Phosphate Phosphatase (TPP) polypeptide for enhancing yield-related traits in plants, particularly increasing seed yield (US Patent Application Publication Number 2010/0024067).

[0176] Other genes and transcription factors that affect plant growth and agronomic traits such as yield, flowering, plant growth and/or plant structure, can be introduced or introgressed into plants, see e.g., WO 1997/49811 (LHY), WO 1998/56918 (ESD4), WO 1997/10339 and U.S. Pat. No. 6,573,430 (TFL), U.S. Pat. No. 6,713,663 (FT), WO 1996/14414 (CON), WO 1996/38560, WO 2001/21822 (VRN1), WO 2000/44918 (VRN2), WO 1999/49064 (GI), WO 2000/46358 (FR1), WO 1997/29123, U.S. Pat. No. 6,794,560, U.S. Pat. No. 6,307,126 (GAI), WO 1999/09174 (D8 and Rht) and WO 2004/076638 and WO 2004/031349 (transcription factors).

[0177] vii. Genes that Confer Increased Yield

[0178] Non-limiting examples of genes that confer increased yield are: (A) A transgenic crop plant transformed by a 1-AminoCyclopropane-1-Carboxylate Deaminase-like Polypeptide (ACCDP) coding nucleic acid, wherein expression of the nucleic acid sequence in the crop plant results in the plant's increased root growth, and/or increased yield, and/or increased tolerance to environmental stress as compared to a wild type variety of the plant (U.S. Pat. No. 8,097,769); (B) Over-expression of maize zinc finger protein gene (Zm-ZFP1) using a seed preferred promoter has been shown to enhance plant growth, increase kernel number and total kernel weight per plant (US Patent Application Publication Number 2012/0079623); (C) Constitutive over-expression of maize lateral organ boundaries (LOB) domain protein (Zm-LOBDP1) has been shown to increase kernel number and total kernel weight per plant (US Patent Application Publication Number 2012/0079622); (D) Enhancing yield-related traits in plants by modulating expression in a plant of a nucleic acid encoding a VIM1 (Variant in Methylation 1)-like polypeptide or a VTC2-like (GDP-L-galactose phosphorylase) polypeptide or a DUF1685 polypeptide or an ARF6-like (Auxin Responsive Factor) polypeptide (WO 2012/038893); (E) Modulating expression in a plant of a nucleic acid encoding a Ste20-like polypeptide or a homologue thereof gives plants having increased yield relative to control plants (EP 2431472); and (F) Genes encoding nucleoside diphosphatase kinase (NDK) polypeptides and homologs thereof for modifying the plant's root architecture (US Patent Application Publication Number 2009/0064373).

### IX. Methods of Use

[0179] Methods of the invention comprise methods for controlling a pest (i.e., a Coleopteran plant pest, including a Diabrotica plant pest, such as, D. virgifera virgifera, D. barberi, D. virgifera zeae, D. speciosa, or D. undecimpunctata howardi). The method comprises feeding or applying to a pest a composition comprising a silencing element of the invention, wherein said silencing element, when ingested or contacted by a pest (i.e., a Coleopteran plant pest including a Diabrotica plant pest, such as, D. virgifera virgifera, D. barberi, D. virgifera zeae, D. speciosa, or D. undecimpunctata howardi), reduces the level of a target polynucleotide of the pest and thereby controls the pest. The pest can be fed the silencing element in a variety of ways. For example, in one embodiment, the polynucleotide comprising the silencing element is introduced into a plant. As the Coleopteran plant pest or Diabrotica plant pest feeds on the plant or part thereof expressing these sequences, the silencing element is delivered to the pest. When the silencing element is delivered to the plant in this manner, it is recognized that the silencing element can be expressed constitutively or alternatively, it may be produced in a stage-specific manner by employing the various inducible or tissue-preferred or developmentally regulated promoters that are discussed elsewhere herein. In specific embodiments, the silencing element is expressed in the roots, stalk or stem, leaf including pedicel, xylem and phloem, fruit or reproductive tissue, silk, flowers and all parts therein or any combination thereof.

[0180] In another method, a composition comprising at least one silencing element of the invention is applied to a plant. In such embodiments, the silencing element can be formulated in an agronomically suitable and/or environmentally acceptable carrier, which is preferably, suitable for dispersal in fields. In addition, the carrier can also include compounds that increase the half life of the composition. In specific embodiments, the composition comprising the silencing element is formulated in such a manner such that it persists in the environment for a length of time sufficient to allow it to be delivered to a pest. In such embodiments, the composition can be applied to an area inhabited by a pest. In one embodiment, the composition is applied externally to a plant (i.e., by spraying a field) to protect the plant from pests.

[0181] In certain embodiments, the constructs of the present invention can be stacked with any combination of polynucleotide sequences of interest in order to create plants with a desired trait. A trait, as used herein, refers to the phenotype derived from a particular sequence or groups of sequences. For example, the polynucleotides of the present invention may be stacked with any other polynucleotides encoding polypeptides having pesticidal and/or insecticidal activity, such as other Bacillus thuringiensis toxic proteins (described in U.S. Pat. Nos. 5,366,892; 5,747,450; 5,737,514; 5,723,756; 5,593,881; and Geiser et al. (1986) Gene 48:109), lectins (Van Damme et al. (1994) Plant Mol. Biol. 24:825, pentin (described in U.S. Pat. No. 5,981,722), and the like. The combinations generated can also include multiple copies of any one of the polynucleotides of interest. The polynucleotides of the present invention can also be stacked with any other gene or combination of genes to produce plants with a variety of desired trait combinations including, but not limited to, traits desirable for animal feed such as high oil genes (e.g., U.S. Pat. No. 6,232,529); balanced amino acids (e.g., hordothionins (U.S. Pat. Nos. 5,990,389; 5,885,801; 5,885,802; and 5,703,409); barley high lysine (Williamson et al. (1987) Eur. J. Biochem. 165:99-106; and WO 98/20122) and high methionine proteins (Pedersen et al. (1986) J. Biol. Chem. 261:6279; Kirihara et al. (1988) Gene 71:359; and Musumura et al. (1989) Plant Mol. Biol. 12:123)); increased digestibility (e.g., modified storage proteins (U.S. application Ser. No. 10/053,410, filed Nov. 7, 2001); and thioredoxins (U.S. application Ser. No. 10/005,429, filed Dec. 3, 2001)); the disclosures of which are herein incorporated by reference.

[0182] The polynucleotides of the present invention can also be stacked with traits desirable for disease or herbicide resistance (e.g., fumonisin detoxification genes (U.S. Pat. No. 5,792,931); avirulence and disease resistance genes (Jones et al. (1994) Science 266:789; Martin et al. (1993) Science 262:1432; Mindrinos et al. (1994) Cell 78:1089); acetolactate synthase (ALS) mutants that lead to herbicide resistance such as the S4 and/or Hra mutations; inhibitors of glutamine synthase such as phosphinothricin or basta (e.g., bar gene); and glyphosate resistance (EPSPS gene)); and traits desirable for processing or process products such as high oil (e.g., U.S. Pat. No. 6,232,529); modified oils (e.g., fatty acid desaturase genes (U.S. Pat. No. 5,952,544; WO 94/11516)); modified starches (e.g., ADPG pyrophosphorylases (AGPase), starch synthases (SS), starch branching enzymes (SBE), and starch debranching enzymes (SDBE)); and polymers or bioplastics (e.g., U.S. Pat. No. 5,602,321; beta-ketothiolase, polyhydroxybutyrate synthase, and acetoacetyl-CoA reductase (Schubert et al. (1988) J. Bacteriol. 170:5837-5847) facilitate expression of polyhydroxyalkanoates (PHAs)); the disclosures of which are herein incorporated by reference. One could also combine the polynucleotides of the present invention with polynucleotides providing agronomic traits such as male sterility (e.g., see U.S. Pat. No. 5,583,210), stalk strength, drought resistance (e.g., U.S. Pat. No. 7,786,353), flowering time, or transformation technology traits such as cell cycle regulation or gene targeting (e.g., WO 99/61619, WO 00/17364, and WO 99/25821); the disclosures of which are herein incorporated by reference.

[0183] These stacked combinations can be created by any method including, but not limited to, cross-breeding plants by any conventional or TopCross methodology, or genetic transformation. If the sequences are stacked by genetically transforming the plants (i.e., molecular stacks), the polynucleotide sequences of interest can be combined at any time and in any order. For example, a transgenic plant comprising one or more desired traits can be used as the target to introduce further traits by subsequent transformation. The traits can be introduced simultaneously in a co-transformation protocol with the polynucleotides of interest provided by any combination of transformation cassettes. For example, if two sequences will be introduced, the two sequences can be contained in separate transformation cassettes (trans) or contained on the same transformation cassette (cis). Expression of the sequences can be driven by the same promoter or by different promoters. In certain cases, it may be desirable to introduce a transformation cassette that will suppress the expression of the polynucleotide of interest. This may be combined with any combination of other suppression cassettes or overexpression cassettes to generate the desired combination of traits in the plant. It is further recognized that polynucleotide sequences can be stacked at a desired genomic location using a site-specific recombination system. See, for example, WO99/25821, WO99/25854, WO99/25840, WO99/25855, and WO99/25853, all of which are herein incorporated by reference.

[0184] The following examples are offered by way of illustration and not by way of limitation.

### EXPERIMENTAL

### Example 1

### In Vitro Transcript dsRNA Screening Method

[0185] A cDNA library was produced from neonate western corn rootworm larvae by standard methods. A selected cDNA clone containing an expressed sequence tag was amplified in a PCR using universal primers to the plasmid backbone and flanking the EST insert. The universal primers also contained T7 RNA polymerase sites. The product of the PCR reaction was used as the template for an in vitro transcription (IVT) reaction to produce long double stranded RNAs. Following enzymatic digestion and removal of the DNA template and single stranded RNA, the IVT reaction products were incorporated into artificial insect diet as described below.

[0186] Different target selection strategies were used in this invention to identify RNAi active targets with insecticidal activities in corn rootworn diet based assay. cDNA libraries were produced from neonate or midgut of 3rd instar western corn rootworm larvae by standard methods. Randomly selected cDNA clones containing an expressed sequence tag (EST) were amplified in a PCR using target specific primers (forward and reverse Table 1), and provided in the sequence listing included herein, to generate DNA templates. The target specific primers also contain T7 RNA polymerase sites (T7 sequence at 5′ end of each primer). Second set of cDNA clones was selected based on homology to known lethal genes from other insects, primarily Drosophila melanogaster. A third set of genes was tested based on involvement in proteasome functions. Identification of these genes was based on a progressive homology search beginning with a list of proteosome genes identified in humans cross referenced to the Tribolium genome database. Hits from Tribolium were then used to parse western corn rootworm sequence database. Proteosome genes were categorized as 26S subunit non ATPase, 26S subunit ATPase, alpha type, and beta type genes.

[0187] Region(s) of WCRW genes were produced by PCR followed by in vitro transcription 5 (IVT) to produce long double stranded RNAs. The IVT reaction products are quantified in gel and incorporated into artificial insect diet for first-round IVT screening (FIS) as described below.

### Insect Bioassays

[0188] dsRNAs were incorporated into standard WCRW artificial diet at a final concentration of 50 ppm in a 96 well microtiter plate format. 5 μl of the IVT reaction (300 ng/ul) were added to a given well of a 96 well microtiter plate. 25 μl of molten lowmelt Western corn rootworm diet were added to the sample and shaken on an orbital shaker to mix the sample and diet. Once the diet has solidified, eight wells were used for each RNA sample. Preconditioned 1^{st} instar WCRW (neonate insects were placed on neutral diet for 24 hours prior to transfer to test material) were added to the 96 well microtiter plates at a rate of 3-5 insects/well. Plates were sealed with mylar which was then punctured twice above each well of the microtiter plate using a superfine insect collection pin. To prevent drying of the diet, plates were first placed inside a plastic bag with a slightly damp cloth and the bags were placed inside an incubator set at 28° C. and 70% RH. The assay was scored for mortality and stunting affects after 7 days and an average was determined based on assignment of numeric values to each category of impact (3=mortality, 2=severe stunting, 1=stunting, 0=no affect). The number reported in this and all diet assay tables reflect the average score across all observations. A score of 3 represents complete mortality across all observations. A score of 2.5 would indicate half the wells demonstrating mortality and half scored as severe stunting. The assay results can be found in Table 1A.

[0189] DNA sequences which encode double stranded RNAs which were shown to have insecticidal activity (average score above 1.5) against corn rootworms using the assay described in Example 1 are listed in Table 1. To identify full length of cDNA or full open-reading frame of RNAi active target gene, full insert sequencing for EST clones and transcriptome analyses of midgut RNA samples were conducted. Sequences of all target transcripts containing full length cDNA or longer transcripts were also listed in Table 1. Some of these sequences were used for RNAi active fragment search.

### Example 2

### Sequences Having Insecticidal Activity

[0190] DNA sequences which encode double stranded RNAs which were shown to have insecticidal activity against corn rootworms using the assay described in Example 1 are set forth below. Non-limiting examples of target polynucleotides are set forth below in Table 1A and B, and SEQ ID NOS: 1, 4, 5, 8, 9, 12, 13, 16, 17, 20, 21, 24, 25, 28, 29, 32, 33, 36, 37, 40, 41, 44, 45, 48, 49, 52, 53, 54, 55, 56, 57, 60, 61, 64, 65, 68, 69, 72, 73, 76, 77, 80, 81, 84, 85, 88, 89, 92, 93, 96, 97, 100, 101, 104, 105, 108, 109, 112, 113, 116, 117, 120, 121, 124, 125, 128, 129, 132, 133, 136, 137, 140, 141, 144, 145, 148, 149, 152, 153, 156, 157, 160, 161, 164, 165, 168, 169, 172, 173, 176, 177, 180, 181, 184, 185, 188, 189, 192, 193, 196, 197, 200, 201, 204, 205, 208, 209, 212, 213, 216, 217, 220, 221, 224, 225, 228, 229, 232, 233, 236, 237, 240, 241, 244, 245, 248, 249, 252, 253, 256, 257, 260, 261, 264, 265, 268, 269, 272, 273, 276, 277, 280, 281, 284, 285, 288, 289, 292, 293, 296, 297, 300, 301, 304, 305, 308, 309, 312, 313, 316, 317, 320, 321, 324, 325, 328, 329, 332, 333, 336, 337, 340, 341, 344, 345, 348, 349, 352, 353, 356, 357, 360, 361, 364, 365, 368, 369, 372, 373, 376, 377, 380, 381, 384, 385, 388, 389, 392, 393, 396, 397, 400, 15 401, 404, 405, 408, 409, 412, 413, 416, 417, 420, 421, 424, 425, 428, 429, 432, 433, 436, 437, 440, 441, 444, 445, 448, 449, 452, 453, 456, 457, 460, 461, 464, 465, 468, 469, 472, 473, 476, 477, 480, 481, 484, 485, 488, 489, 492, 493, 496, 497, 500, 501, 504, 505, 508, 509, 512, 513, 516, 517, 520, 521, 524, 525, 528, 529, 532, 533, 536, 537, 540, 541, 544, 545, 548, 549, 552, 553, 556, 557, 560, 561, 562, 563, 564, 565, 566, 567, 568, 569, 570, 571, 572, 573, 574, 575, 576, 577, 578, 579, 580, 581, 582, 583, 584, 585, 586, 587, 588, 589, 590, 591, 592, 593, 594, 595, 596, 597, 598, 599, 600, 601, 602, 603, 604, 605, 606, 607, 608, 609, 610, 611, 612, 613, 614, 615, 616, 617, 618, 619, 620, 621, 622, 623, 624, 625, 626, 627, 628, 629, 630, 631, 632, 633, 634, 635, 636, 637, 638, 639, 640, 641, 642, 643, 644, 645, 646, 647, 648, 649, 650, 651, 652, 653, 654, 655, 656, 657, 658, 659, 660, 661, 662, 663, 664, 665, 666, 667, 668, 669, 670, 671, 672, 673, 674, 675, 676, 677, 678, 679, 680, 681, 682, 683, 684, 685, 686, 687, 688, 689, 690, 691, 692, 693, 694, 695, 696, 697, 700, 701, 702, 703, 706, 707, 708, 709, 712, 713, 714, 715, 718, 719, 720, 721, 724, 725, 726, 727, 728, or active variants and fragments thereof, and complements thereof, including, for example, SEQ ID NOS: 1, 9, 37, 45, 49, 61, 65, 77, 101, 113, 137, 141, 145, 149, 153, 157, 169, 173, 181, 185, 189, 205, 217, 225, 233, 561, 562, 563, 564, 565, 566, 567, 568, 569, 570, 571, 572, 573, 574, 575, 576, 577, 578, 579, 580, 581, 582, 583, 584, 585, 586, 587, 588, 589, 590, 591, 592, 593, 594, 595, 596, 597, 598, 599, 600, 601, 602, 603, 604, 605, 606, 607, 608, 609, 610, 611, 612, 613, 614, 615, 616, 617, 618, 619, 620, 621, 622, 623, 624, 625, 626, 627, 628, 629, 630, 631, 632, 633, 634, 635, 636, 637, 638, 639, 640, 641, 642, 643, 644, 645, 646, 647, 648, 649, 650, 651, 652, 653, 654, 655, 656, 657, 658, 659, 660, 661, 662, 663, 664, 665, 666, 667, 668, 669, 670, 671, 672, 673, 674, 675, 676, 677, 678, 679, 680, 681, 682, 683, 5 684, 685, 686, 687, 688, 689, 690, 691, 692, and active variants and fragments thereof, and complements thereof, and SEQ ID NOS: 4, 140, 144, 148, 693, 694, 695, 696, 697, 700, 701, 702, 703, 706, 707, 708, 709, 712, 713, 714, 715, 718, 719, 720, 721, 724, 725, 726, 727, 728, and active variants and fragments thereof, and complements thereof.

[0191] Subregions of efficacious dsRNAs were designed to improve insecticidal activities in diet and dsRNA expression in planta. These fragments were assayed in the same manner as the original FIS assays described above. Regions demonstrating a severe impact on larval phenotype (mortality or severe growth retardation) were advanced to informal inhibitory concentration (IC₅₀) assays. IC₅₀ assays used doses starting at 50 ppm and progressing downward by ½ step dilutions through 25, 12.5, 6, 3, 1.5, and 0.75 ppm. 12 observations were included for each rate. Assay methods were the same as described above for primary screens. Calculations of inhibition relied on scoring for both mortality and severe stunting. Selected fragments were advanced to formal dose response assays where both LC₅₀ and IC₅₀ values were calculated and described in Table 2 (Seq No. 561 to 728). These assays included an initial range finding assay followed by dose response assays for selected ranges including 3 replications of the experiment. Fragments with confirmed IC₅₀ values below 2 ppm were advanced to plant transformation vector construction.

[0192] The proteosome alpha subunit type 3 (PAT3) target gene was used as a model for gene and construct optimization. As a first step, the gene was divided into ⅓, ⅙, and 1/12 size fragments (f). In addition, f11-13 represent spanning segments over the boundaries of the first four ⅙^{th} fragments. FIG. 5 provides a diagram of the fragments of PAT3.

[0193] Plant preferred fragments were identified from active RNAi gene targets and tested in dsRNA artificial diet assays. Selection of these plant preferred regions was based on avoiding destabilizing elements and motifs, or regions with unsuitable base composition. Homology assessments were also employed to avoid potential non target organisms. Finally, fragments with a size range of 150-250 bp were preferred. All rules were considered in selecting fragments but fragments were not excluded from consideration based on any one rule. The Table 2 includes data for initial FIS samples and subsequent fragments insecticidal assay. Selected samples were advanced to IC₅₀ and LC₅₀ determinations.

### Example 3

### Identify RNAi Active Targets from Other Insects

[0194] To identify RNAi active genes from other important corn pests or no-target insects, transcriptome experiments were completed using 3rd instar larvae from Northern corn rootworm (Diabrotica barberi), Southern corn rootworm (Diabrotica undecimpunctata), Mexican Bean Beetle (Epilachna varivestis), Colorado potato beetle (Leptinotarsa decemlineata), Insidious flower bug (Orius insidiosus) and Spotted Lady Beetle (Coleomegilla maculata, [CMAC]). Homologous transcripts of RNAi active leads were listed in Table 3 (Seq No. 693 to 723). This sequence data is important for designing fragments to suppress target pest genes and avoid knockdown same gene in no target insects.

### Example 4

### Insecticidal RNA Targets in WCRW Midgut

[0195] Two RNAi active targets Ryanr and HP2 (Table 1 and Table 2) were identified through random cDNA FIS screening. Ryanr was identified in a previous FIS screening (US 2011/0054007A1). Fragments of these targets showed very strong insecticidal activities. Homologous searches reveal that Ryanr and HP2 showed 54% and 49% identity to Drosophila Ssk and Mesh, respectively. The Mesh-Ssk protein complex is required for septate junction formation in the Drosophila midgut. See the amino acid sequence alignment of WCRW Ryanr and Drosophila Ssk in FIG. 4.

### Example 5

### Transformation of Maize

[0196] Immature maize embryos from greenhouse donor plants are bombarded with a plasmid containing the silencing element of the invention operably linked to either a tissue specific, tissue selective, or constitutive promoter and the selectable marker gene PAT (Wohlleben et al. (1988) Gene 70:25-37), which confers resistance to the herbicide Bialaphos. In one embodiment, the constructs will express a long double stranded RNA of the target sequence set forth in Table 3. Such a construct can be linked to the UBIZM promoter. Alternatively, the selectable marker gene is provided on a separate plasmid. Transformation is performed as follows. Media recipes follow below.

### Preparation of Target Tissue

[0197] The ears are husked and surface sterilized in 30% Clorox bleach plus 0.5% Micro detergent for 20 minutes, and rinsed two times with sterile water. The immature embryos are excised and placed embryo axis side down (scutellum side up), 25 embryos per plate, on 560Y medium for 4 hours and then aligned within the 2.5 cm target zone in preparation for bombardment.

[0198] A plasmid vector comprising the silencing element of interest operably linked to either the tissue specific, tissue selective, or constitutive promoter is made. This plasmid DNA plus plasmid DNA containing a PAT selectable marker is precipitated onto 1.1 μm (average diameter) tungsten pellets using a CaC12 precipitation procedure as follows: 100 μl prepared tungsten particles in water; 10 μl (1 μg) DNA in Tris EDTA buffer (1 μg total DNA); 100 μl 2.5 M CaCl2; and, 10 μl, 10.1 M spermidine.

[0199] Each reagent is added sequentially to the tungsten particle suspension, while maintained on the multitube vortexer. The final mixture is sonicated briefly and allowed to incubate under constant vortexing for 10 minutes. After the precipitation period, the tubes are centrifuged briefly, liquid removed, washed with 500 ml 100% ethanol, and centrifuged for 30 seconds. Again the liquid is removed, and 105 μl 100% ethanol is added to the final tungsten particle pellet. For particle gun bombardment, the tungsten/DNA particles are briefly sonicated and 10 μl spotted onto the center of each macrocarrier and allowed to dry about 2 minutes before bombardment.

[0200] The sample plates are bombarded at level #4 in a particle gun. All samples receive a single shot at 650 PSI, with a total of ten aliquots taken from each tube of prepared particles/DNA.

[0201] Following bombardment, the embryos are kept on 560Y medium for 2 days, then transferred to 560R selection medium containing 3 mg/liter Bialaphos, and subcultured every 2 weeks. After approximately 10 weeks of selection, selection-resistant callus clones are transferred to 288J medium to initiate plant regeneration. Following somatic embryo maturation (2-4 weeks), well-developed somatic embryos are transferred to medium for germination and transferred to the lighted culture room. Approximately 7-10 days later, developing plantlets are transferred to 272V hormone-free medium in tubes for 7-10 days until plantlets are well established. Plants are then transferred to inserts in flats (equivalent to 2.5″ pot) containing potting soil and grown for 1 week in a growth chamber, subsequently grown an additional 1-2 weeks in the greenhouse, then transferred to classic 600 pots (1.6 gallon) and grown to maturity.

[0202] Plants are monitored and scored for the appropriate marker, such as the control of a Coleoptera plant pest, such as a Diabrotica plant pest and have insecticidal activity. For example, R0 plant roots are fed to western corn rootworm larvae (WCR, Diabrotica virgifera). Transgenic corn roots are handed-off in Petri dishes with MSOD medium containing antibiotics and glyphosate for in vitro selection. Two WCR larvae are infested per root in each dish with a fine tip paintbrush. The dishes are sealed with Parafilm to prevent the larvae from escaping. The assays are placed into a 27° C., 60% RH Percival incubator incomplete darkness. Contamination and larval quality are monitored. After six days of feeding on root tissue, the larvae are transferred to WCR diet in a 96 well plate. The larvae are allowed to feed on the diet for eight days making the full assay fourteen days long. Larval mass and survivorship are recorded for analysis. A one-way ANOVA analysis and a Dunnett's test is performed on the larval mass data to look for statistical significance compared to an untransformed negative control (HC69). WCR larvae stunting is measured after feeding on two events and compared to growth of larvae fed on negative control plants.

[0203] In other assays, transgenic corn plants (R0) generated are planted into 10-inch pots containing Metromix soil after reaching an appropriate size. When plants reach the V4 growth stage, approximately 400 Western corn rootworm (WCR, Diabrotica virgifera) eggs are infested into the root zone. Non-transgenic corn of the same genotype is infested at a similar growth stage to serve as a negative control. Eggs are pre-incubated so hatch occurs within 24 hours of infestation. Larvae are allowed to feed on the root systems for 3 weeks. Plants are removed from the soil and washed so that the roots can be evaluated for larval feeding. Root damage is rated using a Node Injury Scale (NIS) to score the level of damage where a 0 indicates no damage, a 1 indicates that one node of roots is pruned to within 1.5 inches, a 2 indicates that 2 nodes are pruned, while a 3 indicates that 3 nodes are pruned. Because the plants being used for evaluation are directly out of tissue culture after transformation and because transformation events are unique, only a single plant is evaluated per event at this time. The plants in the assay that present signs or symptoms of larval feeding indicate that a successful infestation is obtained. Negative control plant roots are moderately to severely damaged averaging whereas roots of the transgenic plants provide substantial control of larval feeding, with about 0.2 or less on the Corn Rootworm Nodal Injury Score (“CRWNIS”).

[0204] Bombardment medium (560Y) comprises 4.0 g/l N6 basal salts (SIGMA C-1416), 1.0 ml/l Eriksson's Vitamin Mix (1000× SIGMA-1511), 0.5 mg/l thiamine HCl, 120.0 g/l sucrose, 1.0 mg/l 2,4-D, and 2.88 g/l L-proline (brought to volume with D-I H2O following adjustment to pH 5.8 with KOH); 2.0 g/l Gelrite (added after bringing to volume with D-I H2O); and 8.5 mg/l silver nitrate (added after sterilizing the medium and cooling to room temperature). Selection medium (560R) comprises 4.0 g/l N6 basal salts (SIGMA C-1416), 1.0 ml/l Eriksson's Vitamin Mix (1000× SIGMA-1511), 0.5 mg/l thiamine HCl, 30.0 g/l sucrose, and 2.0 mg/l 2,4-D (brought to volume with D-I H₂O following adjustment to pH 5.8 with KOH); 3.0 g/l Gelrite (added after bringing to volume with D-I H2O); and 0.85 mg/l silver nitrate and 3.0 mg/l bialaphos (both added after sterilizing the medium and cooling to room temperature).

[0205] Plant regeneration medium (288J) comprises 4.3 g/l MS salts (GIBCO 11117-074), 5.0 ml/l MS vitamins stock solution (0.100 g nicotinic acid, 0.02 g/l thiamine HCl, 0.10 g/1 pyridoxine HCl, and 0.40 g/l glycine brought to volume with polished D-I H₂O) (Murashige and Skoog (1962) Physiol. Plant. 15:473), 100 mg/l myo-inositol, 0.5 mg/l zeatin, 60 g/1 sucrose, and 1.0 ml/l of 0.1 mM abscisic acid (brought to volume with polished D-I H2O after adjusting to pH 5.6); 3.0 g/l Gelrite (added after bringing to volume with D-I H2O); and 1.0 mg/l indoleacetic acid and 3.0 mg/l bialaphos (added after sterilizing the medium and cooling to 60° C.). Hormone-free medium (272V) comprises 4.3 g/l MS salts (GIBCO 11117-074), 5.0 mg/l MS vitamins stock solution (0.100 g/l nicotinic acid, 0.02 g/l thiamine HCl, 0.10 g/l pyridoxine HCl, and 0.40 g/l glycine brought to volume with polished D-I H2O), 0.1 g/l myo-inositol, and 40.0 g/l sucrose (brought to volume with polished D-I H2O after adjusting pH to 5.6); and 6 g/l bacto-agar (added after bringing to volume with polished D-I H2O), sterilized and cooled to 60° C.

### Example 6

### Agrobacterium-Mediated Transformation of Maize

[0206] For Agrobacterium-mediated maize transformation with the disclosed polynucleotide constructs comprising a silencing element as disclosed herein, the method of Zhao was employed (U.S. Pat. No. 5,981,840 and International Patent Publication Number WO 1998/32326, the contents of which are hereby incorporated by reference). Briefly, immature embryos were isolated from maize and the embryos contacted with an Agrobacterium suspension, where the bacteria were capable of transferring the desired disclosed polynucleotide constructs comprising a silencing element as disclosed herein, e.g. the polynucleotide construct shown in FIG. 6, to at least one cell of at least one of the immature embryos (step 1: the infection step). In this step the immature embryos were immersed in an Agrobacterium suspension for the initiation of inoculation. The embryos were co-cultured for a time with the Agrobacterium (step 2: the co-cultivation step). The immature embryos were cultured on solid medium following the infection step. Following this co-cultivation period an optional resting step was contemplated. In this resting step, the embryos were incubated in the presence of at least one antibiotic known to inhibit Agrobacterium growth without a plant transformant selective agent (step 3: resting step). The immature embryos were cultured on solid medium with antibiotic, but without a selecting agent, for Agrobacterium elimination and for a resting phase for the infected cells. Next, inoculated embryos were cultured on medium containing a selective agent and growing transformed callus is recovered (step 4: the selection step). The immature embryos were cultured on solid medium with a selective agent resulting in the selective growth of transformed cells. The callus was then regenerated into plants (step 5: the regeneration step), and calli grown on selective medium were cultured on solid medium to regenerate the plants.

### Example 7

### Expression of Silencing Elements in Maize

[0207] The silencing elements were expressed in a maize plant as hairpins using the transformation techniques described herein above in Example 6, and the plant was tested for insecticidal activity against corn root worms. The data from these studies is shown in Table 4 (FIG. 7).

[0208] Maize plants were transformed with plasmids containing genes listed in Table 4 (FIG. 7), and plants expressing the silencing elements were transplanted from 272V plates into greenhouse flats containing Fafard Superfine potting mix. Approximately 10 to 14 days after transplant, plants (now at growth stage V2-V3) were transplanted into treepots containing Fafard Superfine potting mix. At 14 days post greenhouse send date, plants were infested with 200 eggs of western corn root worms (WCRW)/plant. For later sets, a second infestation of 200 eggs WCRW/plant was done 7 days after the first infestation and scoring was at 14 days after the second infestation. 21 days post infestation, plants were scored using CRWNIS. Those plants with a score of <0.5 were transplanted into large pots containing SB300 for T1 seed. The data in Table 4 and FIG. 8 showed that PHP58050, PHP61599, PHP68041, PHP68142 and PHP68043 showed significant reduced CRWNIS compared to non-transgenic HC6 control plants.

[0209] The sequences referred to herein, SEQ. ID NOs: 1-731 are filed concurrently herewith in a textfile and are incorporated herein in their entireties.

[0210] As used herein the singular forms “a”, “and”, and “the” include plural referents unless the context clearly dictates otherwise. Thus, for example, reference to “a cell” includes a plurality of such cells and reference to “the protein” includes reference to one or more proteins and equivalents thereof known to those skilled in the art, and so forth. All technical and scientific terms used herein have the same meaning as commonly understood to one of ordinary skill in the art to which this invention belongs unless clearly indicated otherwise.

[0211] All publications and patent applications mentioned in the specification are indicative of the level of those skilled in the art to which this invention pertains. All publications and patent applications are herein incorporated by reference to the same extent as if each individual publication or patent application was specifically and individually indicated to be incorporated by reference.

[0212] Although the foregoing invention has been described in some detail by way of illustration and example for purposes of clarity of understanding, certain changes and modifications may be practiced within the scope of the appended claims.

That which is claimed:

1. An expression cassette comprising a polynucleotide comprising:
(a) the nucleotide sequence comprising any one of SEQ ID NOs: 724, 725, 726, 727, 728; or active variants and fragments thereof, and complements thereof;
(b) the nucleotide sequence comprising at least 90% sequence identity to any one of nucleotides SEQ ID NOs: 724, 725, 726, 727, 728, or active variants and fragments thereof, and complements thereof; wherein said polynucleotide encodes a silencing element having insecticidal activity against a Coleoptera plant pest; or
(c) the nucleotide sequence comprising at least 19 consecutive nucleotides of any one of SEQ ID NOs: 724, 725, 726, 727, 728, or active variants and fragments thereof;
wherein said polynucleotide encodes a silencing element having insecticidal activity against a Coleoptera plant pest.

2. The expression cassette of claim 1, wherein said coleopteran plant pest is a Diabrotica plant pest.

3. The expression cassette of claim 1, wherein said polynucleotide is operably linked to a heterologous promoter.

4. The expression cassette of claim 1, wherein said polynucleotide is expressed as a double stranded RNA.

5. The expression cassette of claim 1, wherein said polynucleotide comprise a silencing element which is expressed as a hairpin RNA.

6. The expression cassette of claim 5, wherein the silencing element comprises, in the following order, a first segment, a second segment, and a third segment, wherein
a) said first segment comprises at least about 19 nucleotides having at least 90% sequence complementarity to a target sequence set forth in any one of SEQ ID NOs: 724, 725, 726, 727, 728, or active variants and fragments thereof, and complements thereof;
b) said second segment comprises a loop of sufficient length to allow the silencing element to be transcribed as a hairpin RNA; and,
c) said third segment comprises at least about 19 nucleotides having at least 85% complementarity to the first segment.

7. The expression cassette of claim 1, wherein said polynucleotide is flanked by a first operably linked convergent promoter at one terminus of the polynucleotide and a second operably linked convergent promoter at the opposing terminus of the polynucleotide, wherein the first and the second convergent promoters are capable of driving expression of the polynucleotide.

8. A host cell comprising a heterologous expression cassette of claim 1.

9. A plant cell having stably incorporated into its genome a heterologous polynucleotide comprising a silencing element, wherein said silencing element comprises
(a) a fragment of at least 19 consecutive nucleotides of any one SEQ ID NOs: 724, 725, 726, 727, 728, or active variants and fragments thereof, and complements thereof; or,
(b) the nucleotide sequence comprising at least 90% sequence identity to any one of SEQ ID NOs: 724, 725, 726, 727, 728, or active variants and fragments thereof;
wherein said silencing element, when ingested by a Coleoptera plant pest, reduces the level of a target sequence in said Coleoptera plant pest and thereby controls the Coleoptera plant pest.

10. The plant cell of claim 9, wherein the Coleoptera plant pest is a Diabrotica plant pest.

11. The plant cell of claim 9, wherein said silencing element comprises
(a) a polynucleotide comprising the sequence set forth in any one of SEQ ID NOs: 724, 725, 726, 727, 728, or active variants and fragments thereof, and complements thereof; or
b) a polynucleotide comprising at least 130 consecutive nucleotides of the sequence set forth in any one SEQ ID NOs: 724, 725, 726, 727, 728, or active variants and fragments thereof, and complements thereof.

12. The plant cell of claim 9, wherein said plant cell comprises the expression cassette of claim 8.

13. The plant cell of claim 9, wherein said silencing element expresses a double stranded RNA.

14. The plant cell of claim 9, wherein said silencing element expresses a hairpin RNA.

15. The plant cell of claim 14, wherein said polynucleotide comprising the silencing element comprises, in the following order, a first segment, a second segment, and a third segment, wherein
(a) said first segment comprises at least about 19 nucleotides having at least 90% sequence complementarity to a target sequence set forth in any one of SEQ ID NOs: 724, 725, 726, 727, 728, or active variants and fragments thereof, and complements thereof;
b) said second segment comprises a loop of sufficient length to allow the silencing element to be transcribed as a hairpin RNA; and,
c) said third segment comprises at least about 19 nucleotides having at least 85% complementarity to the first segment.

16. The plant cell of claim 9, wherein said silencing element is operably linked to a heterologous promoter.

17. The plant cell of claim 9, wherein said plant cell is from a monocot.

18. The plant cell of claim 17, wherein said monocot is maize, barley, millet, wheat or rice.

19. The plant cell of claim 9, wherein said plant cell is from a dicot.

20. The plant cell of claim 19, wherein said plant is soybean, canola, alfalfa, sunflower, safflower, tobacco, Arabidopsis, or cotton.

21. A plant or plant part comprising a plant cell of claim 9.

22. A transgenic seed from the plant of claim 21.

23. A method for controlling a Coleoptera plant pest comprising feeding to a Coleoptera plant pest a composition comprising a silencing element, wherein said silencing element, when ingested by said Coleoptera plant pest, reduces the level of a target Coleoptera plant pest sequence and thereby controls the Coleoptera plant pest, wherein said target Coleoptera plant pest sequence comprise a nucleotide sequence comprising at least 90% sequence identity to any one of SEQ ID NOs: 724, 725, 726, 727, 728, or active variants and fragments thereof, and complements thereof.

24. The method of claim 23, wherein said Coleoptera plant pest comprises a Diabrotica plant pest.

25. The method of claim 23, wherein said silencing element comprises
a) a fragment of at least 19 consecutive nucleotides of any one SEQ ID NOs: 724, 725, 726, 727, 728, or active variants and fragments thereof, and complements thereof; or
b) a nucleotide sequence comprising at least 90% sequence identity to any one of SEQ ID NOs: 724, 725, 726, 727, 728, or active variants and fragments thereof, and complements thereof.

26. The method of claim 23, wherein said Diabrotica plant pest comprises D. virgifera virgifera, D. virgifera zeae, D. speciosa, D. barberi, D. virgifera zeae, or D. undecimpunctata howardi.

27. The method of claim 23, wherein said composition comprises a plant or plant part having stably incorporated into its genome a polynucleotide comprising said silencing element.

28. The method of claim 27, wherein said silencing element comprises
(a) a polynucleotide comprising the sense or antisense sequence of the sequence set forth in any one SEQ ID NOs: 724, 725, 726, 727, 728, or active variants and fragments thereof, and complements thereof;
(b) a polynucleotide comprising the sense or antisense sequence of a sequence having at least 95% sequence identity to the sequence set forth in any one of SEQ ID NOs: 724, 725, 726, 727, 728; or
(c) a polynucleotide comprising the sense or antisense sequence of a sequence having at least 130 contiguous nucleotides of any one of SEQ ID NOs: 724, 725, 726, 727, 728, or active variants and fragments thereof, and complements thereof.

29. The method of claim 27, wherein said silencing element expresses a double stranded RNA.

30. The method of claim 27, wherein said silencing element comprises a hairpin RNA.

31. The method of claim 30, wherein said polynucleotide comprising the silencing element comprises, in the following order, a first segment, a second segment, and a third segment, wherein
(a) said first segment comprises at least about 19 nucleotides having at least 90% sequence complementarity to the target polynucleotide;
(b) said second segment comprises a loop of sufficient length to allow the silencing element to be transcribed as a hairpin RNA; and,
(c) said third segment comprises at least about 19 nucleotides having at least 85% complementarity to the first segment.

32. The method of claim 27, wherein said silencing element is operably linked to a heterologous promoter.

33. The method of claim 27, wherein said silencing element is flanked by a first operably linked convergent promoter at one terminus of the silencing element and a second operably linked convergent promoter at the opposing terminus of the polynucleotide, wherein the first and the second convergent promoters are capable of driving expression of the silencing element.

34. The method of claim 27, wherein said plant is a monocot.

35. The method of claim 33, wherein said monocot is maize, barley, millet, wheat or rice.

36. The method of claim 27, wherein said plant is a dicot.

37. The method of claim 36, wherein said plant is soybean, canola, alfalfa, sunflower, safflower, tobacco, Arabidopsis, or cotton.

38. An isolated polynucleotide comprising a nucleotide sequence comprising:
(a) a nucleotide sequence comprising any one of SEQ ID NOs: 724, 725, 726, 727, 728, or active variants and fragments thereof, and complements thereof;
(b) a nucleotide sequence comprising at least 90% sequence identity to any one of nucleotides SEQ ID NOs: 724, 725, 726, 727, 728, or active variants and fragments thereof, and complements thereof; or
(c) the nucleotide sequence comprising at least 19 consecutive nucleotides of any one of SEQ ID NOs: 724, 725, 726, 727, 728, or active variants and fragments thereof, and complements thereof;
wherein said polynucleotide encodes a silencing element having insecticidal activity against a Coleoptera plant pest.

39. The isolated polynucleotide of claim 38, wherein said Coleoptera plant pest is a Diabrotica plant pest.

The application's sequence listing, which the Patent Office published only in electronic form, follows.

SEQUENCE LISTING (731 sequences)

SEQ ID NO: 1 - DNA, 593 bp, Diabrotica virgifera
  misc_feature (1)..(593): RNAi target sequence
  misc_feature (480)..(480): n can be any nucleotide
  misc_feature (495)..(495): n can be any nucleotide
tgacttcacacttccagatggttctagagcagcaatagtgaataacataaatgacatggaaagggtttacaatgattttggttccaaatggatgttggaggatgtgttagatcctcaaaagggtagagcattgttccacagggaattcggaaggacttcagcgacttacaacaacaaaacgttcaagcctcaattcctaatgaatccggaagatttcctaccaaccaacagatctacagatcttaagcgaatatccgaaatatgtcctctaaagttgtacgaatgttactacgattacgctatgacggttgacagggatttggcgcattacaccaagaattataaagccacgatctatcaatataaagaaacgacaaggaggaaagttgtgtcttgcggagtactagaaacaccgagattcggacgaaagagtactttcctgttcgtgcccggtacgaaggttacctatgaatgcatccnagagttcgtgttggntaggtgatcagcggagagagtgtcaagcggatggaacatggaatattcctgaatacggatacacatattgcttacgtcagcaggaatactctcaacga

SEQ ID NO: 2 - DNA, 22 bp, Artificial Sequence
  primer
  misc_feature (1)..(22): forward primer
tgacttcacacttccagatggt

SEQ ID NO: 3 - DNA, 22 bp, Artificial Sequence
  primer
  misc_feature (1)..(22): reverse primer
tcgttgagagtattcctgctga

SEQ ID NO: 4 - DNA, 5689 bp, Diabrotica virgifera
  misc_feature (1)..(5689): WCRW transcript ta0120.010_diavv
tgttcatcaccaacgctgaccaacgtgagagtagcaactttttttgatgtgatgtgcgccagtttgtagtgccaaataaccaaaatgtggttcaagtactttgttatttttgttttgtttagtgttagcgttaaaggactagatggtgatcttccaccagatgtcgaaactatcgatgtggagactacgaatgtaagtaacgcggatccagacgcagggaaacctattccggtggaagatacgcctaatggagtccctccagtgaatacaaactatgaagtagataaatccttagttaatgtaaccaatagtttggtaaatgtgactaaaaatcccagacggacttatcagacagttaataaaatgggcaaatattcgacattttatgctgcagattacgatcctatgacctcagacacagctccaccagacactgaccaacgaggaggaggaggaactccatacactatatcagaaccgagactggcagaaataaggaaacattttatgtacccatttttcgataaaggaggcagtgataataacttgggagatttccaaaaggacattcaatcttccattcctcaggtgcacaagaatttaaacttccagttgcctttctttggattcaggtataattacacaagagtttcagtgaatgggtatctggaattcagcgatccacctccaaattatgactatccattagtatttccaattaaagaatggcccaaaaagaatgatcctgcctttattggcattttcttcagcagatgcagaatcggtaatctacgtgatggagacattgatcaaagaacacccggggtctattttagaatggaaagagatttaagaacgaggcaagacagaatgggtgtagaaattagagaaagacttaagtgggatatcagaacaggagtcattggatcagaaacattcgatcctaagcacgccgttattgtcacttggaaaaatgttactttcactggaggattcgctaatgctaaatacaagacaaacaccttccaaatggttcttgcaactgacgaagtcttcacttacgcgatgttcaactacctcaacttggactggacctcccacactgaagcgggtggtgattcccaaaacggggaaggtggtgtcagtgcctatgttggttttaacgctggaaacggtaccagaagctacgaatacaatccttacagtcaagcttccgtcattcgagatctcacatcagttggatttggaaatggttttaagggaagacatattttccgtatagacgaagacattttgcttggatcgtgcaacaaagatatagatggtgccaaccttcccctgaaattcgctcctgaaagtggtaacatgttgggtggaacagtggtaaatataactggtccatgcttcaatttgaatgataggattcgatgcaagtttgacgtatcaaatgaagtatttgggtatgttgttgataaaaacagagctatctgtgtacaacctcaactttatgccgaaggatgggtgaatcttcaaattgctgttaattccgaagcattcaagtggaaggggaagtattatgtagaatcacctgctagtgcgactcaaaaaatcttctttaaggacatgaaattacacgaaaaatctccgagcgaattaaaaatcacttgggagaagcagaatttgaccacaaacgacaacgctaacatccgaatttctctctggggttacagagaaacgactatgaaaccagtgtttgtttatatcaccgatatcgctgataatgttcaaaacattggagaacacacgattgttccttctcagtttagaactagagtcaatcaatatctgactgatattaagtttggattcctccaaattaatttaactgagtctatcacagttaatacatatactacaagccagagcagcatagaattaacaccggtaatatggagccgacccattccactcggttggtacttccagttccaatgggaaaaccagtacggtaaaaattggcccaaatatctatgtgacgattggctgagaacggacagatatctaaaaaacttcgcccacgaacttgctcaatgtccctgcaccgtcgaacaggctttagctgacaagggcaggtttatgccagacttcgattgcgacaaagattcgaacccgatttgttactataacaaccaagcacttcattgtgtgaaaactggatctcccactttagaaggctccgaacaacaatgttgctatgataaaaacggctttttgatgctctcttacgatcagcaatggggttctagtccgagacgttgccacaacttgggtaaaatgccttacaatgaagcgacaaaagtgcctactctctcacaatggtttaatgacatggtacccaaatatttgtgttgtctttggcaagacgagcaagctgtgggatgtgaaacactgagatttgaacggagacctacacaggattgtgtagcttaccaagcaccaggtgtagcaggagtctacggtgatccacactttgttactttcgacgatgtagaatatacgtttaatggaaagggagaattcgcattggtgaaatcagttacgcaaacggacaatctggaaatccaaggaagatttgagcaaatggaccctaacacttatggtgaggttagagctactcagctgacttctgtagtagctaaaggtaataacacaatagcaattgaagtcagaaggagacctctggattctagatggagatataggttggatgttatagcagataatagaagactttattttgatagaccctcactaaaattccagcacttccaaggtgttactatttacactccaagctacatccttaatcaatcagaagtcatcattatgtttgacaatggagctggaatggaggttgtcgacaatcaaggattcatgagtgcaagagtatttttgccttggtcgtttataaataaaaccataggcctttttggaaattggagttttaacaaagaagatgacttcacacttccagatggttctagagcagcaatagtgaataacataaatgacatggaaagggtttacaatgattttggttccaaatggatgttggaggatgtgttagatcctcaaaagggtagagcattgttccacagggaattcggaagaacttcagcgacttacaacaacaaaacgttcaagcctcaattcctaatgaatccggaagatttcctaccaaccaacagatctacagatcttaagcgaatatccgaaatatgtcctctaaagttgtacgaatgttactacgattacgctatgacggttgacagggatttggcgcattacaccaagaattataaagccacgatctatcaatataaagaaacgacaaggaggaaagttgtgtcttgcggagtactagaaacaccgagattcggacgaaagagtactttcctgttcgtgcccggtacgaaggttacctatgaatgcatccaagagttcgtgttggtaggtgatcagcggagagagtgtcaagcggatggaacatggaatattcctgaatacggatacacatattgcttacgtcagcaggaatactctcaacgacaagctggtttggcttccgggataattatggctattcttatcccgctcatcttgcttttcgtctacctggcgtatcgtttcttacaaagaaggcagaaagaaaaagaatctgaaaaattacaagagcaacagttcatggaatcacaaaggagagcccaagaagcagctactaagaaattaacagaagctgaatatgcttcagaagatgaagacagtaatgttacaagcacgggagcaaaagaaacaaccgtatactaacacctatagaatataatgattcaacctatgaattgtaatattttaaagtttaatctttgtcaaaactattatataaaataagtactatattatgttgtagttaatatttaataggacttttattttttattgtatttcagattatatttcatgcagagtgtgatttagattatatttcatgcaaagtgtagagtttcagatatagcctttttaaccacaacgtaatccgattcttatagtaaattcaacattatttaagatactttttcattgaattgtatacctatctaatcctgcaagacccacatatctttttcccaattaaaagagtaaataggaagatacgaaagcacaaagttaaaataaattaacgaatttcataaaacccagtagaaagctatgttctgcagttattatctaaattagaatactattaagtaaccatatcacccttctcaagtttacattaacatcaagatctactggtggcatccataggtaggtgcctactcgtatatttagtaaacaacagtttgttgatccatcaacttcttgttggtaagattcagctcaacgttgagggcaaccggcccttcttcttaaagttccatcttctatcagaggttggatatcataatgggtttggtcactatgttggctgctgctctgaatagttgtaataaactacagttaaaccattatctaaggttctttagccaggagatgcgtcttcttccttggatccttccttgcataataattctcagcaactcatatttttctcctctggtaatgtgacccaaatattccagttttctatgtttttatactgttcataatttctaactccttatttaaacgtcgtagcacttcaacattggtaatcctttgaacccactgaattttcaatattcttctgtaacaccacatttcgaacgcttctatttttcttatgtgttgtctcttcaacgtccaagcttccattccgtatagtaatatagaaaatatgtagcatcttagagccctcaatctgagaggcaactgaaggtctttgtttgtaagcagtgtcttcatttataaatgcttgccttgcagtttcaattcggactttaatttctttgctttggtcatttttgtcatcaacccaggttcccagatatttatatgtctaactttttctatttgggtttgctctctatcattaacctttcatttccatgttgtgtttttgagacaatcataaatttagtttttttcttgtttatttttagtccgtatcgaatgcaataatcgttaattctatttagcaattcttgtagcgatcccagggtgtctgccattataaggatgtcatcagcgaatcttgtgttatttactatttttccgtttatagagattctatcacttagctccgctatcgcttcctgaaatatggcttcactgtacacgttaaacagtagcggcgacagaacacaaccctgtcttactcctctctttatatcaatattctcggattcttgttcttctatctttatattggccttttgattccaatacagattgatgataattcgcaaatctcgtaaaaaagcagctctcatttaatttaacgaagaaccatgtgtaggaaacccatcagcagaatgtagcaggctctggttgccaataataaagaagtcagcaacaagaatataccaacattaacggattagtagaaagttggggtcacttcttcttttggcatgataagcctagatgggtctttgcctgtctggctatgttccattcagatctctcttgtgctcttctccattgtctgttc

SEQ ID NO: 5 - DNA, 446 bp, Diabrotica virgifera
  misc_feature (1)..(446): RNAi target sequence
aagagtagcgatgggtggtttacctcaaggaggaatattaagccctttgttatatttaatttacacttctgatatagaaaaaaatttaaactcaacaaaaattttacaatttgcagatgatgtagttatttatcaagaaaacattaaaatagaaaatgcagtcaaatccattgaagaaggagacaaacatattaaaatatggagtgaattacatggactaaatatatctgattccaaaaccaaattatgtatttttacaagaaaacgaaaagaaatacccaatcacatcttaataaacaatatatcctatcctgtacaaagttatgttaaatatttgggtattactctggatagacagcttctctggaaagaacatatagacaatatagttaaaaaaacagaaaaaggaataaaccttcttcgattcgtatcacacttacgttggg

SEQ ID NO: 6 - DNA, 22 bp, Artificial Sequence
  primer
  misc_feature (1)..(22): forward primer
aagagtagcgatgggtggttta

SEQ ID NO: 7 - DNA, 22 bp, Artificial Sequence
  primer
  misc_feature (1)..(22): reverse primer
cccaacgtaagtgtgatacgaa

SEQ ID NO: 8 - DNA, 7388 bp, Diabrotica virgifera
  misc_feature (1)..(7388): WCRW transcript ta0145.001_diavv
catatattccaacgttttttactcaaaagaaaggtagttataaaattaggtagataaagagatagaagataatgatttattatcattaattaaacctagatttggaattaaattcgaagtattacatgtaaaaagaattatgcggaaagtgattcaagataatggtaatactaattatagtaaaaacaggaaccgtaattgtcacttttaaaggtcagtctataccaaaaaatgtaataatagaaaaaaatgatatacgaggtggaaaattatacacccagaataatccaatgtttaaagtgtttgagatttgggcatataagtgcccaatgtagaggaaaagataggtgtgaaagatgtggcgaagaacacaacaaatctaattgttccaatccgaataatttactttgtgtattgtgcaaaggaaaacacagcgctactgacaagggagcagattgtacagaaagacaaaaacaggaatatattaaaaaaattatgaataatgaaaatataacatattatgaagctaataataaatataaaaaatgttattcaacagtaagtaaagaccaagaaaatacttcaaataaatatacaatatctaaacgaaaaagatcaagtagtattgattctagtagtgtagataaagaaacaatggaagcacgcagaaaaattttgcaaacaccaagaatacaaagtcagccttgttataattttaataatcccatttattctaacacaacacaaacacaaaacgataatcaaaataatataggagaaataatagtaaactttatttcagcaacattaaatcaaattaatcacaatttagatcaaaaaacgttggaattattaaaaaacaatatttcacaattattattacctcgtgatggctaacgtttcatttcttcaatggaatgcgagatcaattaaaacaaataagggttatttagaaaaattcttgtatgacaataaaatagatataggattaatatcagaaacttggttaaaaaaaagtaattttattaactttactggttacaatgtctttaggaatgatagagatgatggatatggtggagtagccatcccttccaaaaaattaataaaattttacaacagtcctacttttcaccaaattaatgacataatgtgcaatagcatatcaattaaaattcaatccggaaaaaagttaaacatttattcaatatacgtaaaaccaaatcttaaaatcactctaaatgaatggaaaaagttttttaatagtctagagaagccttttataattggtggtgattttaatagccacaattatgtttggggttgtagtactgtagatactataggaaaaaatctgttagaagctattgaggactgtaatcttgtaattttaaataatggtaaagaaactttgatgcgtagaccgaatagcaataataaatctgcaatagatcttacaatatgctcagcaaatattagtcattttttcgattgggatgttgtggacgagacattaggatcaaatcattttgctattattattaagtcaaatattaatgttaataaagcggaatgtgtaaatacaaaattccaatggaacataaataaagcggattggtctcttttctcttctatcactgataatttcatggaaatagataataatttaaattaccaacaatttttaaataaattaaacgaatattgtaagatatgtataccggagaagagaacagggactaatccacgatttagaaaaacttggtggaatgacaattgtaaaaaggtaatagaagaacaaaaactagctttacgcaagtttaaactacagtctaatatacaaaattatataaattataataaatgtgtagcgaaaaccaaaaaagttgtattagagagtaagcgtaatgcatggagaaatttttgtaaaactttaaacaaaaatacaccaattaaagatatgtggaatcaagccaaacgattacaaaacatttttaaaccacaagtaaatccagtgactgaaggagaatgggttgaggagtttttaagaaaattatgtccagataatatattttcaaaaattaatgtaatggaaagaaaaaactctatgcatccactttcaattccatttagtttctgtgaattagaaataagccttaagaataagaaaaatacttctccaggtatagataatgtacattatattatgttggccaatttacatcaaaaagggaaagaaacactattaaatttttttaatcaaatatggttatcagaagatattccagataactggagagagtaccgggtgattcctattctcaaaacaaatcggaatcctgattcagcagaatcttatagaggtatttcattgagctcctgcataacaaaaacactggaaagaatgataaaacttaggctcgaaagttggctagaaaaaaacaataaattatcacaaacacaatttggatttcgaaaaaatcattctactgtggaagctgtgagtcatttggtaacagatataaatttagcgtttacgaaaaattcttcagtaatcgctcttttattagatgttgaagcagcatacgacaacgttaatttaaatatactatataacaaaatgatacaaataggtctgccagaatgcttctgtcaaaaaataataaaattgtatgactgtagaaaaatttatatatcggtaaataataacacatttggtccaagagtagcgatgggtggtttacctcaaggaggaatattaagccctttgttatatttaatttacacttctgatatagaaaaaaatttaaactcaacaaaaattttacaatttgcagatgatatagttatttatcaagaaaacattaaaatagaaaatgcagtcaaatccattgaagaaggagacaaacatattaaaatatggagtgaattacatggactaaatatatctgattccaaaaccaaattatgtatttttacaagaaaacgaaaagaaatacccaatcacatcttaataaacaatatatcctatcctgtacaaagttatgttaaatatttgggtattactctggatagacagcttctctggaaagaacatatagaccatatagttaaaaaaacagaaaaaggaataaaccttcttcgattcgtatcacacttacgttggggagcagatccaaatatttctttgttgttatttaaaaataatataagagctatattcgactacggatcaatattatacagtgacgcatcacagtgtcatttaaataaaatagacaaaatcattaataaatcccttagattgtgtataggagccctaagaagtacaccgataaataatctacaagttgaatgctgtgaaatgccgatggatataagacgaaaaaaacttggcatcaaccttttagttagattgtatgaaaaaaaggcaagtttaatttccaaaatacatcaactgtttttagcagacttgacagaaaaatattggataaaaaagaaaactctaaatatggtagatttatattcaaaaatgacaatatatgataaacaactttataaatatgacataaacccaaattataatattgactttaatagtatggaacaagttcaggtatactttttaagggactatagcaagttgcctatatctttaagaaaattagtgtttatctccgacagttcacaaatgttcaaagattattgtatgctatatacagatgcatcaaaaaatattgaaggtgtgggatgtgcctattgggatagcagtaataaaattagtaaaatgtttaaactaaattctattatgagtatatacacagctgaattaatagcgataatggaagcactaaaatatttatctaatataaatcattcaaagtttataatttttagtgacagtaaaagttctcttagtaaaattagtgctataaatcctaaatcaaaagtgaactacattgaattatatatcataaataaaattaaagaacttcagcaacaaggaaagtctgttaagttggcatgggttaaaagccactgtggaataactggaaatgaaatggtagatgaattggctaaaaacgcggtgacacaaggagtattaacccattatctttgtacgccaaaagatattgaatcaaatttattcaaagagattaagaaagaatggaaagaaaggtatattgatgaaaacgtaaatacaggaaaccactacagatcaatcagaaactatataacggataaaccttggttttctaaaatggagtcgacaaaagatatgataagaaccatatgcagaatgagatttgaccactgtcttactccatcatatttatttaaaattaatatagctgatagtccacaatgtatttgtggacagttgggcaatctacaacacaaaattttgacctgttctcttatctctaataaagttaatatgtttttaaattcactgtattctttgactgatgtccaccatcccattaatttaaattatttattaacattagaaaataatgagttggtataccgactattgtataaacatattttagatattaagcttaaattgtaattgtaaaatatagagtaagtatttcttgtaaattgttatatgttaaaagaaaaagaaaagaaaagaaaaaaaaagaaaagaaatataaaaaaataataaaataaaataaaaaaaaaaataataaataaataaaaaaataataaaaaaagaaagaaaaaatataaaaaagatatataaaaaaaatagaaaaaaaaatataataattaaaaaaatataaaaaaaaatatgtagataaaaatgaatgacgaacttggacagtccatagtaaaatagctttcgaatgaagtagagggctaaagaagaatgttgcagtttttgctgtggaactctgagaacatcatttggaaaaaaattaataaaatatatatataataaaaattattaaaaaaaatacaaaaataattatttattagtagaattgtttattatattagtattagttttaggataagatacgaaaaaatgactaataaaataaaaaatagtaaaattggcgaatggatttagtgtccgcagtcatataaacccaaacaaacaacaaaagatcaacgaataccataaatctgagtaatattaattgatttttgaagaaatcgtgtcaaaattatttttattatcaatctaatagtaaacttaaagccagtagaagaacaaccggtttttactggacattatttagaccagtcaaatggtttaggttctatatgagtagaataacaagttaaaacaattatatattatcaaaaaattgaaaaaaggatcggctattttatggtaaagggttttttggtcaatttacttattaaatgttaaggaggtaaacattttaaaatggaataaattgttaatcaatttaaaaaaaaaattctacgagttttaaatttgcgtcaaaaggaggcttttgtagtggaaaatatgtgataaaaatttcaaaactattcgttaaatagtttttaaacaattcaatttgcttattataactttgcgaaaatgaagaatcttttacaactaaaaatattttaccacatctcattttgaaggtttttcaataaatcaaccgattcttttatcagtttttttgataaactatataacaaacatcagcattttgcaaggattgagactattgatgggagcacatgttatccacttattttactttttataatacaatattacaataaatctaacttaaaatataaaatttgggatatggcatttaaaaatattaatttcattaccgccgaatttagatttagatgcgcttaaattcattaataaaatttagattaaaccattacttgaactagctttacaaacaaagagagcaacagaatttgaccaaaaaatatatacacctgcttatgagatcagtcagtggcgtgaagcatgtacgtgatcgcgatcatgactgggacagcgatcacataatagggcttttcattcacaatcatttgtttcgagcttctgtcatgtgtcacataatattaatatacagggtgagtcatgaggactcctacctcgtatagaggcccctatggggaacaacaaacgaccactaaaaagtgtctgctcccattgttcaacaatatacagggcgagttcgcattttgacagaaattcatattcgtcacaattcctgaacggtcagatcgatgtgtctcccattctggccaatcgccacactactaccacccaatcaactaattcattcaaactagaaaaaaacaaggcccgccccaaaaaaattagttcgtttgggtcccagaaaaaacttcaccctgtatacactccttgaaaactccaatatgaattttacaaattagacaaataggcaattaaaatggcatatttatttttttccccacacgactactcaatttttattaaaaaatcaaatttgtcaaaatcggaattttaacctaaaaataaaaaaaattaaatcagcgtttaactcgctacaactctgttccattttaatatttttttctgaaatttttacagcacatacctcttaccattgtgaagactatgaaaaattgttgtagactttcagtcttcttctcgtaaaagttatgaatttttaaaaataaaaggtgcagattcgtgaattgcaaagttaaatcgcaaaaattaagtgaaaaaatttaaaatttatctatttgatcacgtctatgttaaactatagagtcccaaaagaagtgttatgggaagttttagatctagacatgttatagaaaaaaaaaatggtaaaacttttaatttgaggaaaaatgttgtttttgtaaattaatttttgtgaaaatcgttaatttttttaaatctatgcaaaaactttgccaaactttttatgcatagtcaaatttgattttttaactaaaaaactaagtaatcgtgtggggaaaaaataaatatgccatttcaatcgcctacctgtctccctgtaaaattcatattagagccctctaaaaaacgttatttttactttttaaggtttttcgttttaaattttttcctaagacccaaacaaactaatttttcaaatccgggcctgatttctctccagtttgaacaaatcagccgattgggtgataacacaaattaaatatttgctcaaaaaaattcatttttgtaataaaagctatttttttcaatgcatggttgactttaccaaactttcaattattcatagtcaaatttgatttttttataaaaaatcaagtaatcgtgtagggaaaaaataatatggaacagagttgtagcgagttaaaccgtgagttcatttttttttcatttttaggttaaaattccg

SEQ ID NO: 9 - DNA, 445 bp, Diabrotica virgifera
  misc_feature (1)..(445): RNAi target sequence
gtttcgtttcatcatcatttgttgtaatttttgtagtaaagcacattaaaaaaaaaatctgttttaaagccatggctgatgaagaatttgacgaaaatgatgtagcagatgatttcgatgacgacgtagaggatgataatatcgaagaactcgaacaacccgaggaagatggagataacatcgatatccttgctccaggacaagcaggaggtggtgtaccaaaaaacaagaggataacaactaaatatatgaccaaatatgagagagccagagtattaggtactagagccttgcaaatagccatgtgtgccccagttatggttgaactagatggtgaaactgatcctctgcaaattgccatgaaggaattaaaacagagaaagattccaattattattagaagatatttacctgaccattcctatgaagattggggaatagacga

SEQ ID NO: 10 - DNA, 20 bp, Artificial Sequence
  primer
  misc_feature (1)..(20): forward primer
gtttcgtttcatcatcattt

SEQ ID NO: 11 - DNA, 22 bp, Artificial Sequence
  primer
  misc_feature (1)..(22): reverse primer
tcgtctattccccaatcttcat

SEQ ID NO: 12 - DNA, 544 bp, Diabrotica virgifera
  misc_feature (1)..(544): WCRW transcript ta02059.001_diavv
ggtttcgtttcatcatcatttgttgtaatttttgtagtaaagcacattaaaaaaaaaatctgttttaaagccatggctgatgaagaatttgacgaaaatgatgtagcagatgatttcgatgacgacgtagaggatgataatatcgaagaactcgaacaacccgaggaagatggagataacatcgatatccttgctccaggacaagcaggaggtggtgtaccaaaaaacaagaggataacaactaaatatatgaccaaatatgagagagccagagtattaggtactagagccttgcaaatagccatgtgtgccccagttatggttgaactagatggtgaaactgatcctctgcaaattgccatgaaggaattaaaacagagaaagattccaattattattagaagatatttacctgaccattcctatgaagattggggaatagacgagctcattattatagatcactagattgtaatttttatgtggatattatttaatacataggtttttataacaaaaaaaaaaaaaaaaaaaaaaaaaaaaa

SEQ ID NO: 13 - DNA, 563 bp, Diabrotica virgifera
  misc_feature (1)..(563): RNAi target sequence
ttggtgattctggtgtaggaaaaagtaacttattgtcaagatttactagaaatgaattcaatttggagtctaaatctactataggtgtcgaattcgctaccagaagtatacaggtggatggtaaaactattaaagcacaaatatgggacacggcaggtcaagagagataccgagcaatcacggcggcctattatcgtggtgcagtcggtgctctactcgtctacgatatcgccaaacatctgacatacgaaaacgttgaacgttggttgcgcgaattgcgcgaccacgcagatcagaacattgtgatcatgttggtcggaaacaaatccgatctgaggcatttgcgcgccgtgctgacagaagaagctaaggctttcgccgaaagaaacggcctcagcttcatcgagacttcagccctagattcgaccaatgtcgataatgctttccaaaatatactcacagagatctatagaattgtttcccaaaaacagatcagagaccctccggaaaataatatgatgccccaacacatgatgaaccaaaaaatgatgcaaccagacatg

SEQ ID NO: 14 - DNA, 22 bp, Artificial Sequence
  primer
  misc_feature (1)..(22): forward primer
ttggtgattctggtgtaggaaa

SEQ ID NO: 15 - DNA, 22 bp, Artificial Sequence
  primer
  misc_feature (1)..(22): reverse primer
catgtctggttgcatcattttt

SEQ ID NO: 16 - DNA, 689 bp, Diabrotica virgifera
  misc_feature (1)..(689): WCRW transcript ta47051.001_diavv
agttgtccttattggtgattctggtgtaggaaaaagtaacttattgtcaagatttactagaaatgaattcaatttggagtctaaatctactataggtgtcgaattcgctaccagaagtatacaggtggatggtaaaactattaaagcacaaatatgggacacggcaggtcaagagagataccgagcaatcacggcggcctattatcgtggtgcagtcggtgctctactcgtctacgatatcgccaaacatctgacatacgaaaacgttgaacgttggttgcgcgaattgcgcgaccacgcagatcagaacattgtgatcatgttggtcggaaacaaatccgatctgaggcatttgcgcgccgtgctgacagaagaagctaaggctttcgccgaaagaaacggcctcagcttcatcgagacttcagccctagattcgaccaatgtcgataatgctttccaaaatatactcacagagatctatagaattgtttcccaaaaacagatcagagaccctccggaaaataatatgatgccccaacacatgatgaaccaaaaaatgatgcaaccagacatgatgatgaataacgaaatgatgaacgaaaaaatgatgatgccccaacacatgatgaaccaaaaaatgatgcaaccagacatgatgatgaataacgaaatgatgaacgaaaaaatga

SEQ ID NO: 17 - DNA, 204 bp, Diabrotica virgifera
  misc_feature (1)..(204): RNAi target sequence
cccaatgccgagatatattgataccgaacaaggcggatcccaagccagatttttgttgtcgaaagtaaatccaagtcaaactcataacaacatgtattcctacggaggtgattctggagctccagttttgacagatgatgtatcccttcaagtattcatggaccatctaaagaaattggcagtttcgtccacagcataatacct

SEQ ID NO: 18 - DNA, 20 bp, Artificial Sequence
  primer
  misc_feature (1)..(20): forward primer
cccaatgccgagatatattg

SEQ ID NO: 19 - DNA, 20 bp, Artificial Sequence
  primer
  misc_feature (1)..(20): reverse primer
aggtattatgctgtggacga

SEQ ID NO: 20 - DNA, 2636 bp, Diabrotica virgifera
  misc_feature (1)..(2636): WCRW transcript ta01733.001_diavv
gcacgaggcagacacgacatcgaatgacgtggaagttcaaattctgaaacaattaggtgtaatttttaggagctcaataatagtgttatttacatgatagaatcctaataatatatattgaggaatttccttagggaattccgacttgtaatcttcaaaaatgagcacatatgaagagtatatacaacaaaatgaagatcgagatgggattagatttacctggaatgtatggccttcaagcagaattgaagctacccgtctcgtagtacccttagcttgtctgtaccagcctataaaggaacgtctggatcttccaccaatacaatatgaccctgttttatgtactagaaatacttgtagagcaatattaaacccactgtgtcaggtagattatcgagcaaaactctgggtatgcaacttttgtttccagagaaatccatttccacctcaatatgctgctatttcagaacaacatcaaccagcggaattgatgcctatgttttccaccattgaatacacaataactagagctcaatgtttaccaccaatatttttgtatgttgttgacacctgcatggatgatgaagaactgggttccctgaaagactcattgcaaatgtcccttagtttgttgccacctaatgcgttaataggactaataacatttgggaaaatggttcaagttcatgaacttggcactgaaggttgtagtaagtcatatgtgttcagaggtacaaaagatcttagtgctaaacaggttcaagaaatgctgggaataggcaaagtggctttaggtcagcaagcccctcaacagccagggcagcctctaagacctgggcaaatgcaacctactgttgttgcaccaggaagcaggtttctacaacctgtatccaaatgcgatatgaatctaacagacctaataggagaacaacagaaagatccttggcctgttcatcagggtaaaaggtatttaagatctacaggtgtagctttatcgattgccattggtttgttagaatgtacatattccaatactggcgcccgagttatgctatttgttggaggaccttgctcacaaggacctggtcaggtagttaatgatgatttaaaacagcctattagatcacatcatgatattcagaaagataatgcaaaatatatgaagaaaggtattaaacattatgatgcgttagcaatgagagccgcaactaatggtcactctgttgatatttattcttgtgctttggatcagacaggtctgatggaaatgaagcaatgctgtaattctactgggggacacatggtaatgggggattcatttaattcttccttgtttaagcaaactttccaacgtgtgtttaccagagatcaaaaaagtgatctgaaaatggcatttaacggtactttggaagtgaagtgttcccgagaattaaaagttcaaggaggtatcggttcgtgtgtatcacttaacgtgaagagccccttggtttccgacacagaaataggaatgggtaatactgtgcaatggaaaatgtgtactttaacgccaagtactaccatgtctttattctttgaggtcgtaaatcaacattctgctcccatacctcaaggtggtagaggttgtatacaatttattacgcagtaccagcattcaagtggtcaaagaaaaatcagagtaacaacagtggctcgaaattgggctgacgcaactgctaatatacaccatatcagtgccggattcgatcaagaagctgctgctgtaataatggctaggatggccgtttatagggcagaatctgatgatagtccagatgttcttagatgggttgacagaatgctgattagattgtgtcaaaaattcggagaatacaataaggacgaccccaattcattcagacttggtcaaaacttcagtctttacccacagttcatgtatcacttaagaagatctcaatttcttcaagtattcaataattctccggacgagacttcattctacagacacatgttgatgagggaagatcttactcaatctttgataatgattcaacctattttgtatagttatagtttcaatggtccaccagagcctgtattactagatactagctccattcaacctgacagaatattacttatggatactttcttccaaatattaattttccatggagagactatcgcccaatggcgtagtttaaaatatcaagacatgccagaatatgaaaactttagacagctactacaggctccagtagatgatgcacaagaaattttgcaaactaggttcccaatgccgagatatattgataccgaacaaggcggatcccaagccagatttttgttgtcgaaagtaaatccaagtcaaactcataacaacatgtattcctacggaggtgattctggagctccagttttgacagatgatgtatcccttcaagtattcatggaccatctaaagaaattggcagtttcgtccacagcataatacctatatattacaattagatacatttgacataatacagtttttgaatttattcaatatattatattttaagcttaatttttttgtatatttatttcatagatagtttatatatttggtaatgtgatacaataaatttttgttttcc

SEQ ID NO: 21 - DNA, 599 bp, Diabrotica virgifera
  misc_feature (1)..(599): RNAi target sequence
acaaatgtggtggtatcgacaaacgtaccatcgaaaagttcgaaaaagaagcccaagaaatgggtaaaggttcattcaaatatgcctgggtactcgacaaacttaaggccgagagagaacgtggtattaccattgatattgctttgtggaaattcgaaacagctaaatactatgtaaccatcattgatgcccctggacacagagatttcattaagaacatgatcactggtacatcacaagctgactgtgctgtactcattgttgcagctggtactggtgaatttgaagcaggtatttcaaagaatggacaaacacgtgaacatgctcttcttgctttcacccttggtgtaaaacaacttattgttggtgtcaacaaaatggactcgactgaaccagcatacagtgaatcacgtttcgaggaaatcaagaaggaagtatcctcatacatcaagaaaattggttacaacccagctgccgttgctttcgtaccaatttcaggatggcacggagacaacatgttagaaggatctgacaagatgccatggttcaagggatggcaaatcgaacgtaaagaaggaaaagctgaaggaaagtgcttg

SEQ ID NO: 22 - DNA, 22 bp, Artificial Sequence
  primer
  misc_feature (1)..(22): forward primer
acaaatgtggtggtatcgacaa

SEQ ID NO: 23 - DNA, 22 bp, Artificial Sequence
  primer
  misc_feature (1)..(22): reverse primer
caagcactttccttcagctttt

SEQ ID NO: 24 - DNA, 1698 bp, Diabrotica virgifera
  misc_feature (1)..(1698): WCRW transcript ta04714.004_diavv
gggatcttcctttttaatttgctcgtcgtacggtgtggacctcgcgcctggtgttacatcccaagtagtgttccttttattctaagtttaatttcgaacagttgcatttactttatttccaaacaatcaaaatgggtaaagaaaagattcatattaacatcgttgtcattggacacgtagattctggtaaatctactactactggacatttaatttacaaatgtggtggtatcgacaaacgtaccatcgaaaagttcgaaaaagaagcccaagaaatgggtaaaggttcattcaaatatgcctgggtactcgacaaacttaaggccgagagagaacgtggtattaccattgatattgctttgtggaaattcgaaacagctaaatactatgtaaccatcattgatgcccctggacacagagatttcattaagaacatgatcactggtacatcacaagctgactgtgctgtactcattgttgcagctggtactggtgaatttgaagcaggtatttcaaagaatggacaaacacgtgaacatgctcttcttgctttcacccttggtgtaaaacaacttattgttggtgtcaacaaaatggactcgactgaaccagcatacagtgaatcacgtttcgaggaaatcaagaaggaagtatcctcatacatcaagaaaattggttacaacccagctgccgttgctttcgtaccaatttcaggatggcacggagacaacatgttagaaggatctgacaagatgccatggttcaagggatggcaaatcgaacgtaaagaaggaaaagctgaaggaaagtgcttgattgaggctttggatgctatccttcccccatctcgtccaactgagaaacccctccgtcttccactccaggatgtctacaaaattggtggtattggaacagtacctgtaggtcgtgttgaaactggtgtattgaaacctggtatggttgtagtattcgctccagccaatttgacgactgaagtaaaatccgttgaaatgcatcacgaagccctccaggaagcagtacctggtgacaatgttggtttcaacgtcaagaatgtctctgttaaagaattgcgtcgtggttacgtagctggagacaccaagaacaacccacccagaggagcttcagacttcactgcccaagtcattgttctcaaccaccctggtcaaatctcaaacggatatacccctgtactcgactgtcacacagctcacattgcctgcaaattcgctgaaatcaaagaaaaggttgaccgtcgttctggtaagaccactgaagaaaatcccaaagccatcaaatctggtgatgccgccattgtcaacttggtacccaccaagcccatgtgtgtagaatcattccaagaattcccaccccttggacgttttgctgtccgtgacatgaggcaaaccgttgcagtaggagtcatcaagagcgttgccttcaaagatcccagcgccggaaaagtcacaaaagctgcagaaaaagcccaaaagaagaaatagtctatttggactccactacttaaataattttgatatgttttgtttcttttatatattaatattggagtatcaatgtatttttaataactaatggacttattacttgcattgcattatttgtgatctgtaaattaaacttggacaaataaagaaaaaaattaaaaaaaaaaaaaaaaaa

SEQ ID NO: 25 - DNA, 550 bp, Diabrotica virgifera
  misc_feature (1)..(550): RNAi target sequence
ccagggaaagagagaagtacgataatttagcagatttgtatgctgtaataaacactttgcaacaattagagaaggcatatattcgagattgtgtagtggcaaaggaatatacaggagcttgtagtaaattattagttcagtataaggctgcgtttcgacaagtcaagagtgatgaatttcctacaccagacgcctttgttaagaagtacaggcttgactgtcctgcagctttagaacgtatcaaggaagataggccaatcactatcaaagacgacaaaggcaacactagtcgatgcattgctgatatcgtatcgctattcatcactataatggacaaactgcggttggacattcgttcgatggataacttacatcctgacgtgagggacttagtagatactatgaacagacttagcattctgccatcggatttcgatggaaaggtaaaagtggctgaatggttaaatactttaaatgaaatgcaggcctctgatgaattatccgaagctcaagtgaggcaactgttgtttgatcttgaaagtgcgtatgc

SEQ ID NO: 26 - DNA, 22 bp, Artificial Sequence
  primer
  misc_feature (1)..(22): forward primer
ccagggaaagagagaagtacga

SEQ ID NO: 27 - DNA, 22 bp, Artificial Sequence
  primer
  misc_feature (1)..(22): reverse primer
gcatacgcactttcaagatcaa

SEQ ID NO: 28 - DNA, 769 bp, Diabrotica virgifera
  misc_feature (1)..(769): WCRW transcript ta01620.001_diavv
atataaatagaaaaatgtcagcagaaaatcgccctgagctgtatgaggaagtcaagctatatcacaatgccagggaaagagagaagtacgataatttagcagatttgtatgctgtaataaacactttgcaacaattagagaaggcatatattcgagattgtgtagtggcaaaggaatatacaggagcttgtagtaaattattagttcagtataaggctgcgtttcgacaagtcaagagtgatgaatttcctacaccagacgcctttgttaagaagtacaggcttgactgtcctgcagctttagaacgtatcaaggaagataggccaatcactatcaaagacgacaaaggcaacactagtcgatgcattgctgatatcgtatcgctattcatcactataatggacaaactgcggttggacattcgttcgatggataacttacatcctgacgtgagggacttagtagatactatgaacagacttagcattctgccatcggatttcgatggaaaggtaaaagtggctgaatggttaaatactttaaatgaaatgcaggcctctgatgaattatccgaagctcaagtgaggcaactgttgtttgatcttgaaagtgcgtatgcgtcctttaataaagtccttcataattctgcctaaatgtacgagatagttgttatgattgttacacgtttatgtaaatattataagcaaaaaaaattgagctagatagttattggcaatgtatgcatttatcaattttaaccctaattgga

SEQ ID NO: 29 - DNA, 578 bp, Diabrotica virgifera
  misc_feature (1)..(578): RNAi target sequence
aatccaaaagctgaagtggctagagctgcacaagccctagccgttaatatatcagcggcaaaaggcattcaagatgtaatgaagtcaaaccttggtcccaaaggaacagtgaaaatgttggtatctggtgccggcgatataaaaataaccaaagatggaaacgttctattgcacgaaatgcaaattcaacaccccacggcttcccttattgctcgagcctcaactgcccaagatgatatgaccggcgacggcactacatcgactgtgttagtcataggtgaactattaaaacaagcagatatttacatagcagaaggtctccaccctagattgttaacagatggctttgataaggctaggacaaaagcgttggaagtactggagaaaatgaagatttcaattgaagcgaacaaagaaactttaacagatatttgcaggacgagtttaagaacaaagctgcatcaaaaactggctgatgttttgacagacgtttgtgtggatgctgttctagctataaagaaagatggcaaacctgttgatcttcatatggttgaattaatggaaatgcagcacaaaac

SEQ ID NO: 30 - DNA, 20 bp, Artificial Sequence
  primer
  misc_feature (1)..(20): forward primer
aatccaaaagctgaagtggc

SEQ ID NO: 31 - DNA, 20 bp, Artificial Sequence
  primer
  misc_feature (1)..(20): reverse primer
gttttgtgctgcatttccat

SEQ ID NO: 32 - DNA, 1864 bp, Diabrotica virgifera
  misc_feature (1)..(1864): WCRW transcript ta00896.001_diavv
gggggtcaaaaattttgggttggctcaacacgagttttctattttatttgaaaaaatagtattttaaataatggctatcagtttgttaaatccaaaagctgaagtggctagagctgcacaagccctagccgttaatatatcagcggcaaaaggcattcaagatgtaatgaagtcaaaccttggtcccaaaggaacagtgaaaatgttggtatctggtgccggcgatataaaaataaccaaagatggaaacgttctattgcacgaaatgcaaattcaacaccccacggcttcccttattgctcgagcctcaactgcccaagatgatatgaccggcgacggcactacatcgactgtgttagtcataggtgaactattaaaacaagcagatatttacatagcagaaggtctccaccctagattgttaacagatggctttgataaggctaggacaaaagcgttggaagtactggagaaaatgaagatttcaattgaagcgaacaaagaaactttaacagatatttgcaggacgagtttaagaacaaagctgcatcaaaaactggctgatgttttgacagacgtttgtgtggatgctgttctagctataaagaaagatggcaaacctgttgatcttcatatggttgaattaatggaaatgcagcacaaaacagaaacagatactcagttaattaagggtttagtcctggaccatggctcccgtcatccagatatgcctaaaagtctcaacaactgctacattttaacatgtaatgtcagcatggaatatgaaaaaagtgaagtcaattcaggattcttctacaaaactgcagaagagagagaaaaattagtgactgcagagcgtgaattcattgagcagagagttaagaaagtcattgaactgaaaaggtcactctgtaatggaactgataagacttttgttgttattaaccaaaaaggtattgaccccatgagcctggatatgcttgccaaagaaggaataatagctctcagaagagctaagagacgtaacatggagcgtctatcattggcttgtggtggagtagctatgaacagctttgatgatctgcaagaatctcaacttggtagagccggacatgtatatgaacatgtgttgggagaaaataagtatacatttgtggaagattgcaaaattcctcaatcagttactattttaatgaaagggccaaataaacatactttgactcagattaaagatgcagttagagatggattaagggctatcaataatgccattgacgataaagcagttattccaggtgctggtgcatttgaagtcacagccaataaagaattgctagcatttaaagacactgttaagggtaaagctcgtctaggagttgccgcttatgcagaagctttactggtagttcccaagactttggctgttaactctggatttgatgcacaggacaccattctaaaactacaagaagaatcccgtttgaatccagacccaatcggtttagatctaacctctggggaacccatcaatcctaaagatgctggcatctatgacaactatattgttaaaaaacaaataatcaattcctgttcggtcattgccagcaacctcttattggttgatgaaattatgagggctggaatgagcagcttaaagggataaaatcgaagtattcaaatttaaatctgtatttttgtgcttgttttaatttatcattacattatgtattttcttaacctctgaaaggttgctacttaatatttagtggacatacacataatgctgtaacgttgataacatacacacgtaacatttataatatttgcaataataaaatgtcaaaaaaaaaaaaaaaaaatgcga

SEQ ID NO: 33 - DNA, 709 bp, Diabrotica virgifera
  misc_feature (1)..(709): RNAi target sequence
gaaaatgccaaccaaagtcttcgagaagagctgtcctttaaggatcagatccatcaacaacagttgacagaaactcgtactcgtcgtcaagtagaaatcagcgaaatcgacggtcgcctggcagaaaaatatgaggctaagcttcaagaggctctacaagaactcagagatcaatatgaaagtcaaatggccaacaaccgtggcgaaatcgagttgctttacgaacagaagattaagaacttgcaatcagctaatgacagacatgctgcctctgcctccggtgctcttgacgaattgagacaagttagaaccagaatcgatactttgaattctcgaattagcgatttagagaaccagaacgctggcttagcagctcgtgctagagatttggagaagttgttagagaatgagcgcatgcgccatgtggaagacctcgcaatgttagaaagagaattgcatagactccgagaagaaatggctaatcaacttcaagaataccaggatcttatggacattaaggtttctcttgatttagagatagctgcttatcggaaactgctcgaatctgaagaagctcgtcttaatattaccccaacaggtagtgaagttcatgaagtaactcacagtaggagccaacgcagctcgtcgcaacgtcgcactccagtcagattgggagccaaaagaaagcgaacactactcgaagaaagcc

SEQ ID NO: 34 - DNA, 22 bp, Artificial Sequence
  primer
  misc_feature (1)..(22): forward primer
gaaaatgccaaccaaagtcttc

SEQ ID NO: 35 - DNA, 22 bp, Artificial Sequence
  primer
  misc_feature (1)..(22): reverse primer
ggctttcttcgagtagtgttcg

SEQ ID NO: 36 - DNA, 2662 bp, Diabrotica virgifera
  misc_feature (1)..(2662): WCRW transcript ta03354.001_diavv
aaaaaccgttaaacgccgctcccatcatatcatctccaaaaatagtttgattacctcgggtagaccgcgacataatttgtgcttcgaccgatctctctctttgagttgtcgcttttcgaggtatttagttgcaggcgtggtgtatacgttgaaatagtgatttttgttaaaagtgagtaaatatggcatcgaaatcaaaaaaagggtcaacaccgttagcttcacagcggccggcgagccccttaagtcctaccagacattctagattacaggagaagcatgaacttcagaatcttaacgaccgtttggcgggatatatagatcgagtaaggtatttagaaggtgaaaacaacagattaacgagggaaatacaaagtacccaggaaacagtaacaagggaagtttcaaacattaaatctatgtatgaccatgaattatcagatgctagaaaactattagacgagacccaccgtgaaaaagcacgtttagagatagatgttaaacgtcttttagaagagaatgacgaactcaagtctgagttagcaaagaagaacaaggatttggctctagctgagaattctgccaggatatacgagaccagatgtaacgagttacagctcaaagcaaatcaagcggctgctgatgctaagaaagctattgcagatgctaaggaacttgagaaagaacgtgataagctacgcaaacttcttgataatcatcgtaaacagttagaagaagaatcattagcgagagtggaagtcgaaaatgccaaccaaagtcttcgagaagagctgtcctttaaggatcagatccatcaacaacagttgacagaaactcgtactcgtcgtcaagtagaaatcagcgaaatcgacggtcgcctggcagaaaaatatgaggctaagcttcaagaggctctacaagaactcagagatcaatatgaaagtcaaatggccaacaaccgtggcgaaatcgagttgctttacgaacagaagattaagaacttgcaatcagctaatgacagacatgctgcctctgcctccggtgctcttgacgaattgagacaagttagaaccagaatcgatactttgaattctcgaattagcgatttagagaaccagaacgctggcttagcagctcgtgctagagatttggagaagttgttagagaatgagcgcatgcgccatgtggaagacctcgcaatgttagaaagagaattgcatagactccgagaagaaatggctaatcaacttcaagaataccaggatcttatggacattaaggtttctcttgatttagagatagctgcttatcggaaactgctcgaatctgaagaagctcgtcttaatattaccccaacaggtagtgaagttcatgaagtaactcacagtaggagccaacgcagctcgtcgcaacgtcgcactccagtcagattgggagccaaaagaaagcgaacactactcgaagaaagccaagagtcaagcatgaatgactatacggtgaacagctcctcaaaaggtgacattgaagtcgctgatgtcgatccagaaggacactatgttaagttgcacaataaaagtaatcaagaagtcgcacttggaggatggcaagtcattagacgtgttggtgaggaggaaactacattcaaatttcacaggtcactaaagcttgaaggtaatggatttgtaacaatatggagctctgacctcaacaaagatcatgaacctccaactaatttagttatgaagagtcagaaatgggttgtaggtgataacatggtcaccacattattgaataataacggagatgaagtagctgtctccgaaagagttaaaaggcaattaacaagctcccatctaagacacagagaactagcagctggctacctctcagaagaactccaccatcaacagggtgatccacaagtagatgaaagatgtaggcttatgtaaagttaacacatctcatttaatttttttatttacagttaaggttggaatgttacagaagtaggttgtgctccttacttacgctttttaaactattttttaagtgatgttcttaatattataagattctaggacagaaggaacacaacttatactgttattgacaaaaaacttactgaaaattgcaattagacaacagtagtaagtttaatactaagaatacaggatgaggtaataattattattctttatataaactgtctttttaggagttttatatatattttttaaatatcttgcatataagtcttgaattacagttgtcatttttataaatttaaacctgaaaaatacattatttcgcattaatacctcatcctgttcgatagtttcttaagatagataacaaactgccagttcgataagttttcttttaactaacacaattgtttattagtataatataattttgaaaaattactgtactgttgtccccaaaacattaaagtgttctgcatttatttaaagaataataaactttttatattaatggtagttcttttgtttttgaggtttttcactcagctgtttacgcttgttttagttagataggtgttgcaaaaactatagggataaaaatctagatttggtttcagttacttgtattatattttattgtatatctttattcttgatcttcgaaacttaaatctgta

SEQ ID NO: 37 - DNA, 635 bp, Diabrotica virgifera
  misc_feature (1)..(635): RNAi target sequence
aatggctttacacgtccctaaagcaccgggctttgcccagatgttaaaagaaggagccaggcactattctggtttggaagaagctgttataagaaacataatagcatgcaaggaatttgcacaatccgtaaaaactgcctatggtccaaatggtatgaataaaatggtcattaatcacattgagaaacaatttgtcacaagtgatgcagctacaattatgcgagaactagatattgaacatccagcagccaaactcatgatactaggaagtcaaatgcaagattctgaggtgggtgatggaactaactttgtgattatacttgctggagcacttttggagcatgctgaagaactaattcgtcttggagtaactcccacagaaatagcagaaggttatgagaaagcactagacaaatgtctagaaatccttcctaatcttatttgctacacaatcaaggatttcagaaacatcgaagaagtcaaaaagggcatacaaacctcaattcaatctaagcagtatggcaatgaagagtttctatcaaaacttattgcagaagcttgtgtgtcaattttgccagaagaaacaacatttaatgttgataatgttagaatatgtaaagttttggggtctggtt

SEQ ID NO: 38 - DNA, 22 bp, Artificial Sequence
  primer
  misc_feature (1)..(22): forward primer
aatggctttacacgtccctaaa

SEQ ID NO: 39 - DNA, 22 bp, Artificial Sequence
  primer
  misc_feature (1)..(22): reverse primer
aaccagaccccaaaactttaca

SEQ ID NO: 40 - DNA, 1866 bp, Diabrotica virgifera
  misc_feature (1)..(1866): WCRW transcript ta04788.001_diavv
ggaactctatggtcttcagtcactctaaataaaatcctataaccttttttgggatttcaattcgaattaaataaatttcttcagaaacatacaagaaacaaatacagacaatggctttacacgtccctaaagcaccgggctttgcccagatgttaaaagaaggagccaggcactattctggtttggaagaagctgttataagaaacataatagcatgcaaggaatttgcacaatccgtaaaaactgcctatggtccaaatggtatgaataaaatggtcattaatcacattgagaaacaatttgtcacaagtgatgcagctacaattatgcgagaactagatatagaacacccagcagccaaactcatgatactaggaagtcaaatgcaagattctgaggtgggtgatggaactaactttgtgattatacttgctggagcacttttggagcatgctgaagaactaattcgtcttggagtaactcccacagaaatagcagaaggttatgagaaagcactagacaaatgtctagaaatccttcctaatcttatttgctacacaatcaaggatttcagaaacatcgaagaagtcaaaaagggcatacaaacctcaattcaatctaagcagtatggcaatgaagagtttctatcaaaacttattgcagaagcttgtgtgtcaattttgccagaagaaacaacatttaatgttgataatgttagaatatgtaaagttttggggtctggtttacataactctcaggttgtacaaggtatggttttcaaaagacaagttgaaggggaaataactaaagcagaaaaagctaaaattgctgtattcagctgtgctgttgatattatgcaaacagaaactaaaggaactgtacttatcaaaactgcagatgaacttatgaactttagtaggggagaagaaaatcttcttgaattacaaatcaaatgtatagcagatgctggagctaaagttgtagttgcaggagccaaatttggagatatggctctacattacttacataaatatggcatgatggttgtcaggttgaactccaaatttgatttgagaagattatgcaaaactgttggtgctacttgtcttccacgcctaacagctcccacatctcaagaacttggttacgcagatattgtatgtgtagaagaattgggtgatacccctatagtttctttcagattggagggcaaagaatcaagaatttccacaattgtcatcagaggtgctactgacaattacatggatgacattgaaagagcaattgatgatggagttaatacatttaagggaatctctcgagatggcagatttgttcctggtgccggcgccgttgaagcagagttagctgttcagctgactaaatatgcagacactcttccaggcttagaacagtatgctgtcagaaaattcgcatctgcccttgaaagttttcccaaaacgttggcagataatagtggacacaaatccacagcagtattagaaaaaatattggaagctcaccagaatggtcagaaaaatgttggagttgacatagaagctgaaagtgcagtatgtgacgctttggaaaagaacatcttggacctttatcaatgtaaatattggggactgaagtatgctgtaggagcagcagcaaccattttaagagtcgaccaaattattatggcgaaaagggcaggtgggccaaaagttaggcaaccaaagggaagtgatgacgaatcttgaaatcgttaattttgcgcttggtttctcgtatacacttaaattcaccttacaactcacttgtattaatctgttaatttaattttttaattaatatttcttaaccaaaaaaaaaaaaaaaaaa

SEQ ID NO: 41 - DNA, 579 bp, Diabrotica virgifera
  misc_feature (1)..(579): RNAi target sequence
ccagagacttcatatcccaaccaagactcacttacaaaactgtatctggtgtcaacggtccactagtaatcctcgaagatgtcaaatttcctaagttcaacgaaattgtccaactcagattatctgacggaagtttaagatcaggtcaagtacttgaagtcagcggttccaaggctgtagtacaagtattcgaaggtacatcaggtatcgatgccaaacacactgtctgtgagttcacaggagatattctcagaactccagtctctgaggatatgttgggaagagtattcaacggctctggaaaacctattgacaaaggtcccccaattctggctgaagactacctagatattcaaggacaacccatcaacccatggtcccgtatctacccagaggaaatgatccaaactggtatcactgccatcgatgtgatgaactcgattgcccgtggtcagaagattcccattttctcagctgctggtctgccacataacgatattgctgcccaaatttgtaggcaagccggtcttgtcaaaatcccaggcaaatcagttttggatgaccacgaagacaactttg

SEQ ID NO: 42 - DNA, 22 bp, Artificial Sequence
  primer
  misc_feature (1)..(22): forward primer
ccagagacttcatatcccaacc

SEQ ID NO: 43 - DNA, 22 bp, Artificial Sequence
  primer
  misc_feature (1)..(22): reverse primer
caaagttgtcttcgtggtcatc

SEQ ID NO: 44 - DNA, 2471 bp, Diabrotica virgifera
  misc_feature (1)..(2471): WCRW transcript ta00620.009_diavv
tcttaaacttccgtcagataatctgagttgctaattttttactgtctttgatagacgtctcctgtacacgtaaaaatggcttcgacgatatcggcaagacaggctaacagagaacatgttttggccgtatccagagacttcatatcccaaccaagactcacttacaaaactgtatctggtgtcaacggtccactagtaatcctcgaagatgtcaaatttcctaagttcaacgaaattgtccaactcagattatctgacggaagtttaagatcaggtcaagtacttgaagtcagcggttccaaggctgtagtacaagtattcgaaggtacatcaggtatcgatgccaaacacactgtctgtgagttcacaggagatattctcagaactccagtctctgaggatatgttgggaagagtattcaacggctctggaaaacctattgacaaaggtcccccaattctggctgaagactacctagatattcaaggacaacccatcaacccatggtcccgtatctacccagaggaaatgatccaaactggtatcactgccatcgatgtgatgaactcgattgcccgtggtcagaagattcccattttctcagctgctggtctgccacataacgatattgctgcccaaatttgtaggcaagccggtcttgtcaaaatcccaggcaaatcagttttggatgaccacgaagacaactttgccatcgtgttcgctgctatgggtgttaacatggagactgctagattcttcaaacaagatttcgaagaaaatggttctatggaaaacgtatgtttgttcttgaacttggctaacgatccaaccatcgaaagaatcatcaccccacgtcttgctctaacagccgctgaattcttggcttaccagtgcgaaaaacacgtgttagtcattttaactgacatgtcttcatacgctgaagctttgcgtgaggtatctgccgccagagaggaagtacccggtcgtcgtggtttccccggttacatgtacaccgatttggccaccatctacgaacgtgccggtcgtgtcgaaggccgtaacggttccatcactcaaatccccatcttgactatgcctaacgacgatattactcaccctattcccgatttgacaggttatattaccgaaggacagatctacgtcgaccgtcaattgcacaacaggcagatctacccaccaattaacgtactgccatctctctcacgtttgatgaagtctgctatcggcgaaggtatgaccaggaaggaccactctgacgtttctaaccagttgtatgcttgctatgctatcggtaaggacgtccaggccatgaaagccgtagtaggtgaagaagctctaacacccgacgatcttctctacctcgagttcctaacgaaattcgaaaagaacttcatcacccaaggaaactacgaaaaccgcaccgtcttcgagtctttggacatcggctggcaactactccgtatcttccctaaggaaatgttgaaacgtatccctgcaagcacattggcggaattctatccaagagactctcgtcactagttggtttatgtataaaatttatatatatttaggaagtttgttaggtttgttacaaatatgtccacttattgtatcgattattttcaattgagagatattttaccaaaacaatttgagccgatgagattctacggtgtaatttttgtaaatacttaaagagcgtgtttcaaaaatgcgcttaatataatatattatcaatacagagcaacctttttttctttattgtttttttcactccaaagttcttgaactcctaaaaggagcatagagcttcagtgaaaaggcgccatcccctcattccaagactttccttgacctcttaccaattgttggaaaaattataactcagattaattttattaggtgacagttccataagtaaaaatatgcaatggctatatattgcgtactaaacttaagaagaaaaattgtgtcgctctggaagaaagattacttgcataagaatgaaaatcagtgtcatattttgcgtttatgacatccctagacgatactattttttcgttactatattttttttaaagagatcaagagcaacaatttggagactgatattcttatgcgagttgttttcctactttgtcctattttgaagagtctacaattatttacttaccatttgattaaattagatgaacataagacaatactatatttttatcatgtaagttgatattccctatgtaaattattggcacaatgtaacctccaacttgatttatacatttattttacttttgtttgtctattttttctgtaatagagtggaagaattaacattccattaaatgtcattgcccaatgtataaagcaatatacctcttaccattcgatgctttttcagtattttaattctagatggtgaacggagatttttcttgatgtaggttttg

SEQ ID NO: 45 - DNA, 670 bp, Diabrotica virgifera
  misc_feature (1)..(670): RNAi target sequence
tcgtaatttttggttgtgcttgagaaaatcgtcaaacatccaaaatggtgaacttcaccgtagatgaaattagggccatgatggacaaaaagaggaacatccgtaacatgtccgtcattgcccatgtggaccatggtaaatctacattaacagattctctagtatcaaaagctggtattattgctggtgccaaagctggagaaaccagattcacagacacaaggaaagatgaacaggaacgttgtattaccatcaaatcaactgccatatctatgttcttcgagttagatgataaagatcttgtgttcatcaccaacgctgaccaacgtgagaaagatgtgaaaggtttcttgattaaccttattgactctcctggacacgttgatttctcatcagaagtaacagctgcccttcgtgtcactgatggtgcccttgtagtagtagattgtgtatctggtgtatgtgtacagactgaaactgtactccgtcaagctattgcagaacgtattaagccaattttattcatgaacaagatggaccgtgccctcttagaattacagttggaatctgaagaactttaccagactttccaacgtattgttgaaaacgtcaacgtcattattgccacctacaacgatgattcaggtccaatgggtgaagtcagagttga

SEQ ID NO: 46 - DNA, 22 bp, Artificial Sequence
  primer
  misc_feature (1)..(22): forward primer
tcgtaatttttggttgtgcttg

SEQ ID NO: 47 - DNA, 22 bp, Artificial Sequence
  primer
  misc_feature (1)..(22): reverse primer
tcaactctgacttcacccattg

SEQ ID NO: 48 - DNA, 4535 bp, Diabrotica virgifera
  misc_feature (1)..(4535): WCRW transcript ta02030.005_diavv
ggggggcagagagtcggtctctttctttcacgggagtgcgccatcgttggcgtatcgtaatttttggttgtgcttgagaaaatcgtcaaacatccaaaatggtgaacttcaccgtagatgaaattagggccatgatggacaaaaagaggaacatccgtaacatgtccgtcattgcccatgtggaccatggtaaatctacattaacagattctctagtatcaaaagctggtattattgctggtgccaaagctggagaaaccagattcacagacacaaggaaagatgaacaggaacgttgtattaccatcaaatcaactgccatatctatgttcttcgagttagatgataaagatcttgtgttcatcaccaacgctgaccaacgtgagaaagatgtgaaaggtttcttgattaaccttattgactctcctggacacgttgatttctcatcagaagtaacagctgcccttcgtgtcactgatggtgcccttgtagtagtagattgtgtatctggtgtatgtgtacagactgaaactgtactccgtcaagctattgcagaacgtattaagccaattttattcatgaacaagatggaccgtgccctcttagaattacagttggaatctgaagaactttaccagactttccaacgtattgttgaaaacgtcaacgtcattattgccacctacaacgatgattcaggtccaatgggtgaagtcagagttgaccccagcaaaggttcagttggttttggatcaggtctccacggatgggctttcactctcaaacaattctctgaaatgtatgccgagaaattcaagattgatgtagttaaactaatgaaccgtttgtggggtgagaacttcttcaaccccaaaaccaagaaatggtccaaacaaaaggatgatgataacaaacgttcattctgtatgtacatcttagatccaatctacaagatttttgactccatcatgaactacaagaaagaagaatatgaagcactccttccaaaattgggtattgccttaaaacatgaagataaagacaaagatggtaaacaattattgaaagtagttatgcgtacctggttgccagctggagaagctttacttcagatgatagccattcacttaccatcacctgtggtagcacagaaatacagaatggaaatgttgtacgaaggacctcatgatgatgaagcagctgttggtatcaagaactgtgatccaaatgcacctcttatgatgtatgtatctaaaatggtacccacttctgacaaaggtcgtttctatgcttttggtcgtgtattctctggtaaagtagctactggtatgaaagcccgtatcatgggacccaactacacccctggcaaaaaggaagatttatatgaaaaggctatccaacgtaccattctcatgatgggtcgttatgttgaagctattgaagatgtcccatctggtaacatctgtggtttggttggtgttgatcaattcttggttaagactggtaccattaccactttcaaggatgcccacaacttgaaggtcatgaaattcagtgtatctcctgtagtacgtgttgctgttgaacctaagaaccctgctgatttgccaaaacttgtagaaggtttgaaacgtttgaccaaatccgatcctatggtccaatgtatcattgaagaatctggtgagcacatcattgctggtgccggagaattgcatcttgaaatttgccttaaggatcttgaagaagatcatgcctgcattcccattaagaaatctgaccctgttgtatcctaccgtgagacagtaagtgaagagtctgatcagatgtgcctctcaaaatcacccaacaaacacaacagattgttcatgaaagcttgtcctatgcctgatggacttgctgaagatattgatgatggtaaagttaacccacgtgatgacttcaaagtccgtgcccgttatcttactgagaaatatgactatgatataactgaagcccgtaagatctggtgctttggacctgatggtactggacccaacatccttgttgattgtactaagggagtgcaatatcttaatgaaatcaaagactctgtggtagctggtttccaatgggcaaccaaagaaggtgtcttgtctgaagaaaacttgagaggtgttagattcaacatttatgatgttaccttacacgctgatgctatccatcgtggaggtggtcaaatcattccaacaacccgtaggtgtttgtatgcttgtttaatgacagctgcacccagacttatggaacctatctacaagtgtgaaattatgtgtcctgaagttgctgttggtggtatttatggtgtattgaacagaagacgtggtcacgtatttgaagaagctcaaatcgctggtacacctatgttcttagtaaaagcttacttacctgtaaacgaatcattcggtttcactgctgatttacgttccaacactggaggtcaggccttcccacaatcagtcttcgatcactggcaaatcttacctggtgacccaatggaacccagtaccaaaccctatggaattgtgcaggacacacgtaaaagaaagggtcttaaagaaggacttccagacctggcacaatatctggataaattataaacaactaagaaacttaatttatgtacagattatttaataaaattatttcaatttactcaacggtttttatagttaattgtatttttgatatttttattctgataagttttcagttctctcaaattgatggcaacactagaaatgaaataaactaaataatctgactaatattttatgtttgttatatatatttttgttaacagtccagatatttgtatatttattaatttgacatcaaaagtaaatctgatgaaacatttttgagtatttatttgtggatacaaattcgtcttgttttatttttactcccttgaaacattttattagtgtaatttttatttgagcagtactgattaatgttaagtatattttttggatatgtgtataataaaactcagttttgtaaggaatctagttttctttaatgtgggtatccaaatcaattacgttaagtaaataaaatactatacccaaagttatacaaggttagagagtaaacaataaaacattaaatattctgtacatacattctagactcggataagatgaccgctgaaaataaatgggccctcttgtactactatatctggtacatagtgttactacagaactagaggattttttaaaattgaaggagctaataccacatcagaaaaacacccacatgctttataaaacattaggaaggaaagagtcattacgtataaaaattggagcatactttacagtaaatgaaacaaagaaaccttatctaaacaaatattcacaaagtcctggataaattcattaagatcaatcacattcaatataacagaatttcttcattgttttgaactctttgtagatatctcttggaaacattaatatgctgattggaattctttaattattttatgaaaatattatggttgatttatggcacctgactgatttcagatctccaaatacacattaggaaatcatgatgaagaaaccatttttatttttccatgtagcaaattttctatagaaatattagcttgctaatatccactaactagtagaagtttgtaatgtcacatttatttaaagaaatggcaggatagcaaggattttattttctttaaaaatgataaattgcatacctttgaagaagacaaaatattactcctatacatttcatacaaacaataaaaagaagaaaccacgataccagatgaggaaaaacatggaattcagttcatttagaattgattgttttgaaaagcttaaactaattgatttttgcaagttgacagctgacaaggaatgctcctatacaaactgaaagatcgacgattaggatattttttaaaggttttgtaatgagtaacatattcctaggagtatatcttgagacataatgtgaaagatctaaaatatcctatggggcagattcctgttgtatttaaaaaaagggctgcaaattaatagccactaaagctgactttgctgtttttgaaacaaaaagtctgcgaattaataaccactgaggctgactttgctgttttttaaagaaaaggttgttaattaataaccggtgagactaaccctgatgtttttgaaagaaaggggttgctaattcataatccatggcgcaaactctactgtttttgaaataagagatttttgagaaattgtactgaaaatgtgcctgttcgtattaatatgaactgaaaacaacaaaggcaaatcagggatctaacctaccgatctttaaaaggctgttcccaaaaataaatgattctgatggtttcatggacttaagagtgaaatcaagagaaggtgtctgttcaatatagaaagttttggggatgaaattctttctctctggaatagtttctgttattcaaggtgttaaactaagaatatttcaggataaaa

SEQ ID NO: 49 - DNA, 528 bp, Diabrotica virgifera
  misc_feature (1)..(528): RNAi target sequence
  misc_feature (499)..(499): n can be any nucleotide
  misc_feature (500)..(500): n can be any nucleotide
cgtcaaaagtatttgtcgcatcaactgaagacatgagaaaataattttttacaacataatattttcagatattaaatcaagatggtactagcagatttaggtcgtaaaattacgaccgccttgcagtctttaagcaaggcaacaattattaatgaagaggtcttaaatggaatgctaaatgatatttgtcgggcactcattgaggctgatgttaatatcaaattagttaaatctctcagggaaaatgttaaatctgttattgactttgatgaaatggctggtggtctcaacaagaggaggatgatccaaagtgcagtatttaaagagcttgtcaaattggtagacccaggagtaaagccatatcaacctgttaaaggcaaaccaaatgttattatgtttgttggtttacaaggttctggtaaaacaaccacttgtaccaaactagcttatcattatcagaaaaagaactggaaatcatgtttggtatgtgcagatacanncagagctggtgcctatgatcaggtaaaa

SEQ ID NO: 50 - DNA, 22 bp, Artificial Sequence
  primer
  misc_feature (1)..(22): forward primer
cgtcaaaagtatttgtcgcatc

SEQ ID NO: 51 - DNA, 22 bp, Artificial Sequence
  primer
  misc_feature (1)..(22): reverse primer
ttttacctgatcataggcacca

SEQ ID NO: 52 - DNA, 1927 bp, Diabrotica virgifera
  misc_feature (1)..(1927): WCRW transcript ta05283.001_diavv
ggggggtcgcatcaactgaagacatgagaaaataattttttacaacataatattttcagatattaaatcaagatggtactagcagatttaggtcgtaaaattacgaccgccttgcagtctttaagcaaggcaacaattattaatgaagaggtcttaaatggaatgctaaatgatatttgtcgggcactcattgaggctgatgttaatatcaaattagttaaatctctcagggaaaatgttaaatctgttattgactttgatgaaatggctggtggtctcaacaagaggaggatgatccaaagtgcagtatttaaagagcttgtcaaattggtagacccaggagtaaagccatatcaacctgttaaaggcaaaccaaatgttattatgtttgttggtttacaaggttctggtaaaacaaccacttgtaccaaactagcttatcattatcagaaaaagaactggaaatcatgtttggtatgtgcagatacattcagagctggtgcctacgatcaggtaaaacagaactgtacaaaagctaggatacccttttatggaagttacacagaagttgatcctgtagtcatagcccaggatggtgttgatatgtttaaaaaggaaggttttgaaattataatagtagatacaagtggtagacacaagcaagaagaatctttgtttgaagaaatgttggcagtttctaatgctgtgagaccagacaatattattttcgttatggacgccacaattggtcaagcctgcgaagcccaagcaaaagcctttaaagaaaaagtagatgtaggatccgtaattatcacaaaattggatggtcatgcaaaaggaggtggtgcacttagtgccgttgcagctactaacagtccagttatatttatcggtacaggagagcacatagacgatttagatccatttaaaacaaaacctttcattagtaaattattggggatgggtgacatagaaggtttaattgacaaagtaaacgaattaaagttagaagataatgaagaattgttagaaaaaattaaacatggtcaatttacgctcagagatatgtatgaacaatttcaaaatataatgaagatgggacctttttcacaaattatgggtatgatcccaggatttagccaagattttatgtcaaaaggaagcgaacaggaatcaatggcacgattaaaaagattaatgacaataatggacagtatgaatgattacgagttggacaacagggatggcgcaaaattgtttactaaacaagttggtagagtggtcagggtcgcacaaggatctggtgtaacagaaagagaagtaaaagatctcattacgcagtacacaaaattcgcagcggtggtaaagaaaatgggaggcatcaaaggtctcttcaaaggtggcgatatggctaaaaacgtcaaccacaaccagatggcgaaacttaatcaacaaatggccaaaatgatggaccctagagtcctccaacaaatgggcggcatggcaggtttgcaaaatatgatgagacaactccaagcaggcgcagctggtggtttagggggcttaggtaatcttatggggggctttggtaataaatgattgttaaatattttttatgattattttgaattgccatttgatacttctttcagaagccatatgttgtgtcaagcaacattttttatttgtagaataatctaataattaacgcagactttatcattaccgaagcaaactgctacaatatgtataaagaaagttaatggcatttgaaagaattattgagtgatttgtttctaaatggatgaggaagcagagtatttttgttttgttttgaatgtgtagaaaatattttatattgacattgtaaaaacggtacactgtttgtaacttattcctaaaaataaacagttttctaataaaaaaa

SEQ ID NO: 53 - DNA, 605 bp, Diabrotica virgifera
  misc_feature (1)..(605): RNAi target sequence
aggctgtaagagaacctatgcagtctggaattaaggctgtagattctcttgtaccaattggtcgtggtcagcgtgagttgatcattggtgatcgtcaaactggtaaaactgctttggctattgatacaatcatcaaccaaaaacgattcaacgatgctgaagacgaaaagaagaaattgtactgcatttacgtcgccatcggtcaaaagagatctactgtggctcaaatcttgaagcgtctcacagacactggtgccatcaactacacaatcattgtatcagctactgcatctgatgctgcacctttgcaatacctcgccccatactccggatgtgctatgggtgaatttttcagagataatggcaaacatgccctcatcatctatgatgatttgtccaaacaagccgtagcctaccgtcagatgtctctgttgcttcgtcgtcctccagggcgtgaagcctaccctggtgatgtattctaccttcactcccgtcttttggaacgtgccgccaagatgtctgaagcccacggtggtggttcattgactgccttgcccgtaattgaaacccaagctggtgatgtatcagcctacattccaaccaat

SEQ ID NO: 54 - DNA, 23 bp, Artificial Sequence
  primer
  misc_feature (1)..(23): forward primer
aggctgtaagagaacctatgcag

SEQ ID NO: 55 - DNA, 22 bp, Artificial Sequence
  primer
  misc_feature (1)..(22): reverse primer
attggttggaatgtaggctgat

SEQ ID NO: 56 - DNA, 2003 bp, Diabrotica virgifera
  misc_feature (1)..(2003): WCRW transcript ta00263.005_diavv
ggggggatcgtgcgcagttcggcctattcgggtactcgttcagtgttcgtcacttaattttcagtactggggcgactggcaaaaaaatgtctttgctttccgcacgattagctgcctcattggcaagaaatgcccctaaaaatgtaacacagattgcgggagctgtcttccctgctgcatccgtcgcagcccggaacttccatgctactccacaaaacaaaggtgctgaaatttcatccatccttgaagagcgcatccttggtgctgcaccaaaagccaacctcgatgaaacaggacgagtcttaagtattggtgacggtatcgcccgtgtatatgggttgaacaacatccaagccgatgagatggtggaattctcctccggtctcaaaggtatggcccttaacttggaacctgacaacgttggtgttgtagtatttggtaacgacaaactcattaaggaaggtgacattgtcaagagaactggtgccattgtagatgtgcctgtaggtgaccaaattttgggacgtgtagttgatgccttaggtaacccaattgatggcaaaggaccattgaacaccaaacaacgtttccgtgtaggtatcaaagcccctggtatcattccacgtatctctgtaagagaacctatgcagtctggaattaaggctgtagattctcttgtaccaattggtcgtggtcagcgtgagttgatcattggtgatcgtcaaactggtaaaactgctttggctattgatacaatcatcaaccaaaaacgattcaacgatgctgaagacgaaaagaagaaattgtactgcatttacgtcgccatcggtcaaaagagatctactgtggctcaaatcttgaagcgtctcacagacactggtgccatcaactacacaatcattgtatcagctactgcatctgatgctgcacctttgcaatacctcgccccatactccggatgtgctatgggtgaatttttcagagataatggcaaacatgccctcatcatctatgatgatttgtccaaacaagccgtagcctaccgtcagatgtctctgttgcttcgtcgtcctccagggcgtgaagcctaccctggtgatgtattctaccttcactcccgtcttttggaacgtgccgccaagatgtctgaagcccacggtggtggttcattgactgccttgcccgtaattgaaacccaagctggtgatgtatcagcctacattccaaccaatgtcatttccatcactgatggacaaatcttcttggaaactgaattgttctacaaaggtatcagacctgccattaacgtaggtttgtctgtatccagagtaggatcagctgctcaaaccaaggccatgaaacaggttgctggttccatgaaactggaattggcccaataccgtgaagtagctgcttttgcccaattcggttccgatcttgatgctgctactcagcaattgttgaacagaggtgtacgtcttactgaattgttgaaacaaggtcaatacgtacccatggctattgaagaacaagtagccatcatctactgtggtgtcagaggacatttggacaaagttgatccatcaaagattacagtatttgaaaaacaattctcagaacacattaagactagccacaaaaacatcttgcagagcattgccaaggaaggaaaaatcacagacgatactgatgcccaactcaagaaagtcgttcaagatttcttggccagcttctctggttaaatataaataatacaattattattaatacctaaatcgtcacttttgttgatgtgatctgtaaacgtttaagaacttcatgagctgtaatcctttcaaattagaataattaggcaggactcctatgttatccaataaggcacgtgaaagaattttcttttctccattttacaatatttatcgatcattgttttttaaggatatcttatttgtaaaaataaaaaataaactttatattttttaaaaaaaaaaaaaaaaaatcgg

SEQ ID NO: 57 - DNA, 583 bp, Diabrotica virgifera
  misc_feature (1)..(583): RNAi target sequence
gcacgaggctttattagacagaggtattcatcccataaggattgctgatggtttcgagctagcttgtcaaacagctgtagctcatttggaaaaaattgcagaactatttccggtatcagcagaaaacactgaaccattaataaaagttgcaatgaccactctgggatctaaaatcattaacaagtgtcataaacagatggcagaaatagctgttaatgcagtcttagctgttgcagatttagaacagaaagatgttaattttgaacttattaaagttgaaggcaaggttggtggaaaattggaagacacaacattagttaaaggtgtagttattgacaaaacaatgtcccatccacaaatgcccaaagaactaaaagatgtaaaattggctattctcacctgcccgttcgaaccaccaaaaccaaagaccaaacataagttggatgtcagcagtgtggaagattataaggaactaagacagtatgaacaagaaaagttcaaagaaatcgttggtttggtaaagaaagctggagctacattagcaatttgtcaatggggcttcgatgatgaagccaatcactta

SEQ ID NO: 58 - DNA, 23 bp, Artificial Sequence
  primer
  misc_feature (1)..(23): forward primer
gcacgaggctttattagacagag

SEQ ID NO: 59 - DNA, 22 bp, Artificial Sequence
  primer
  misc_feature (1)..(22): reverse primer
taagtgattggcttcatcatcg

SEQ ID NO: 60 - DNA, 1889 bp, Diabrotica virgifera
  misc_feature (1)..(1889): WCRW transcript ta05506.001_diavv
aaaaatatcaaatgtcagttttctgtcactttcatgggagtagccagttcgaaacaaaaataaaattttaattaatctggaacatctcccaattttttagaaaacttacattttcaatatgagtgctataccaggaagtattgcatttgatgaatatggacgacccttcataattcttagagaccaagataagcaaaagaggttgaccgggatagatgcacttaagtcacatattttggcagcgagacaaatcgctcaaactataagcacttctttgggtcccaaaggtttagacaagatgatggtgtcacctgacggtgaagtaacagtcactaatgatggtgctactattttgaaaatgatggatgttgaacatgaagtcgctaaattgctagtacagctatcacagtcccaagatgatgaaattggtgatggtaccacaggtgttgtagttttggctggtgccctgttagagcaagcaggatctttattagacagaggtattcatcccataaggattgctgatggttttgagctagcttgtcaaacagctgtagctcatttggaaaaaattgcagaactatttccagtatcagcagaaaacactgaaccattaataaaagttgcaatgaccactctgggatctaaaatcattaacaagtgtcataaacagatggcagaaatagctgttaatgcagtcttagctgttgcagatttagaacagaaagatgttaattttgaacttattaaagttgaaggcaaggttggtggaaaattggaagacacaacattagttaaaggtgtagttattgacaaaacaatgtcccatccacaaatgcccaaagaactaaaagatgtaaaattggctattctcacctgcccgttcgaaccaccaaaaccaaagaccaaacataagttggatgtcagcagtgtggaagattataaggaactaagacagtatgaacaagaaaagttcaaagaaatcgttggtttggtaaagaaagctggagctacattagcaatttgtcaatggggcttcgatgatgaagccaatcacttattgttacaacaagaattaccagctgtaagatgggttggaggtccagaaattgaacttatagcaatagctactgggggtaggatagttccccgttttgaagagcttactcctgaaaaacttggtcatgctggtttggtacgagaaattgcatttggcaccactaaggatagaatgttggttattgaagaatgttcaaattcacgggcagttacgattcttgtcagaggaggtaatcaaatgttagtagctgaagccaagagaagtctccatgatgcattatgtgttgtcaggagtttagttcaagaaccaagagtagtgtatggtggtggagcagcagaaattgcctgctgtttggcagtcgcggctcaagcagatcaactagcttccttggaacagtacgcctatcgtgcatttgctgaagccttagaaagtataccacttgctttggctgataacagtgggctatctgcgatccatacgctaggagaagtcaaggctaaacaagcagctacaggagatccagctctcggtatcgattgtatgaatactggaaacctcaacatgagagaacaacatgttatcgaatcactcagatcaaaaagacaacaatttttgttggccacccagttggttaaaatgatattgaaaattgacgatgtacgccaacctgcatcgggataaaatgacacttatttttgtactaccggcgttaatttctaattctcactaataatgacttttataagttgatctgcgtaatgcttctttgttcttataatcactgaaagtattaatataatttatagaaaaaaaaaaaaaaaaaatgcga

SEQ ID NO: 61 - DNA, 588 bp, Diabrotica virgifera
  misc_feature (1)..(588): RNAi target sequence
agagaacagtcagcacaagcagttattgatatcgatgatttagataatttggctacacctgaaagtatattgttgagtgctgtttctggagaagatgcccaagaccgttcagatcgtacaattcttactccgtgggttaagttcctttgggaatcttactgtcaatgtttggaacttttgcgtactaatgcacatgttgagaacttatatcatgatatagccaggatggctttccagttttgtttgaaatataatagaaaaacagaatttagaaaattatgtgataaattgaggaaacatttagaggatatctgcaaattaccaacacaaatggcaaatgtttctatgtctaaaccagaaacccaacaacttaatcttgaaacgaggctccatcaactagattttgctattcagatggagttatggcaagaagcctacaaggccatcgaagacatccataacttgatgaatttgtccaagaagagtccagtaccaaaaaccatggcaaactattaccagaaactagccatggtgttctggaaagctggtaattatctattccatgctgctgctttgttcaagttcttc

SEQ ID NO: 62 - DNA, 22 bp, Artificial Sequence
  primer
  misc_feature (1)..(22): forward primer
agagaacagtcagcacaagcag

SEQ ID NO: 63 - DNA, 22 bp, Artificial Sequence
  primer
  misc_feature (1)..(22): reverse primer
gaagaacttgaacaaagcagca

SEQ ID NO: 64 - DNA, 3733 bp, Diabrotica virgifera
  misc_feature (1)..(3733): WCRW transcript ta05000.002_diavv
attttgtctttcaactgacgtttgctttgacgaaatttcagaagataatagttttatttactattctatatatttaaatgtgaagtgaatacaacaaataaacacagtaaagatggcccgatacggtcagcgtccggaaaacgctttaaagcgagcgaatgaattcatcgaagttggaaaaccagctagagcccttgatactctccaagaagtttttcgtaataaaaaatgggcgtacaattggtcagaatccgttttggaacctattatgttcaaatatctggatctatgtgtagaactgaaaaaatctcacattgccaaggaaggtcttttccaatacaggaacatgttccagtcagtgaatgtaggatcacttgaaaatgttataagagggtatttgcggatggcagaagaaagaacagagaatgctagagaacagtcagcacaagcagttattgatatcgatgatttagataatttggctacacctgaaagtatattgttgagtgctgtttctggagaagatgcccaagaccgttcagatcgtacaattcttactccgtgggttaagttcctttgggaatcttactgtcaatgtttggaacttttgcgtacaaatgcacatgttgagaacttgtatcatgatatagccaggatggctttccagttttgtttgaaatataatagaaaaacagaatttagaaaattatgtgataaattgaggaaacatttagaggatatctgcaaattaccaacacaaatggcaaatgtttctatgtctaaaccagaaacccaacaacttaatcttgaaacgaggctccatcaactagattttgctattcagatggagttatggcaagaagcctacaaggccatcgaagacatccataacttgatgaatttgtccaagaagagtccagtaccaaaaaccatggcaaactattaccagaaactagccatggtgttctggaaagctggtaattatctattccatgctgctgctttgttcaagttcttccagttgtcaaaggagatgaagaagaacatcactccagaggaattacaaagaatggcctgtagggtattaatcgctacactagcaataccgttgccttccgctcaccctgagtttgatagattcattgaaaccgacaagtcacctttagagaaggctcagcgtttagctgttttattggggctgattcaaccacctactagagctagtcttttgagagatcttgtaagagttaatgttgtgaacctggcaagtccacaactacaagatttgtacaattggctggaagtggagttccatcctttactattgtgtcagagagtgcatgaggtaatcaaatctctcgaatctgaagaaaatgcagccctccaacaatatgtgccagctttacaagatgtaactctggtgcgtctagtgagacagatagcacaagtctatcagaccatagaatttgctaggttgatccagattgccaaatttactacaccttttcatctggagagacttttggttgattgtgtgagacacaatgatatgcaaattcgtattgatcatggcaaagactgtatccactttggaatggacctgagtgaaagccaaagagaggacaaaccagagggacccactttgcaagttatgcctagtgagcaagtcagaaatcaacttattaacatgtctactgtattgaatcaagccatacaagtcattaatcctaataagaagaagcttgaacgcgaaaaacttagagctgttatggttcagaattatcacgaaacaaaggttagagaacaccagaaaattttacaaaggcacaagattattgaggacagaaaggaatatattgagcgtttgaatacagtcagggaagaagaggagcagaaaagattggaagaaatgcaacggcagcacttactggccgaacaaaaacgattggaccaagaaagagaagaaagagagcggaaacgtgctctaaatgaaatccagcaggttaaagacagacacttaaaggaaaaactacaacaaatcagacagactggtcatggtcagaagattctgaagaaaatggatgaagacgatatcaaaaagcttgatgcagaccaaatagcggtgaaagaagcagaagagctacaaaaggaacgtcgcgaacttcaagccaagcttaaatctcaagaaaagaaggtagactatttcgagcgtgccaagcggttggaagaaatccctctacttcaagccaatatgcaagaacgtcaattacaggatcagaacttctgggagcaacaggagaaagagcgaatcgctgcagcaattgaagagcgcaagctggccgtcgcaacgagagaccgtttgctacgcatgaaagtcgacaaagatgaattcatctcgaaattaaagaaggagagaaacattgtctacgaagacaatcttaaggaattcgagaagatgttgagcgaggaaagaaagaagaggcttttggaaagaaagatccaaagaaaagaggagcgccgtgctacatatattaaagagaaggaagaagaagccgaacgtagagccaacgaaaagagacgtcgcgaagaagaagaaagggagagattagaggaaatagcgagaaaagaacaggagcaacaagaacgcgcactaaaggaggaacaagaaaggaagaagaaggaacatcaagagagtttggatagagcttggacaatgcagaaagctaaagaggaagaaatcgaaaagaaattagcaatggagaaagaaagcagcgacaaaggaaaagattcttggaggaaagaccccaagaatagctcttcttggaggagggacgagaaacctgctgacgaacccaaaaatgaaccttggagagcatctcgtttccgatcaaatgctgaagaacccccaaaaggcgacaacaccactacttcttcttggaggaatgacgataaaagggaagatcgcagagacgatcgccaaggtgaacgtcgcggcggagacggcggaagatttggcaaccgcgacagcggaagatttggcgacagagacagagaaggtggtgtcagattcacgagagataatcgggataatcgtggggatcgcagggacgatagggagaggagagacgacagggataacagggataggagagacgacagagatcgtagagatgatagggataggagagacgacagggagcgtagagatgatagagagagaagagatgaccgtggcggaagagatgataaccgggaccgccgagacgatcgtgatcgtagagacgacagggaccgaagaggcggggacgaaggtacttggcgtagaaagactgacgatgaccgtcgttctactcctatgagaagagaagctgctccagaatcagcatggaggagtgctaaccgagagaccgatcgtagagatgattctaagagagacgatagaaggggaactccgatgaccagagaaaaaccagcagctcgcgagcagcaatctcagccagaaggcgaggagggctggtcccaagttggaaggagacgttaagccattatataatctagactagagaattaagttacacaattataccgatattttatttacctacaggttacgagggttttcatttatagtaatcattgttttaatgcggaactggcttgaactcgttgataaggcagtgctgtgtgctaattaacccatatagttaataaaatttcagatattataaaaaaa

SEQ ID NO: 65 - DNA, 716 bp, Diabrotica virgifera
  misc_feature (1)..(716): RNAi target sequence
ttgaaaaagatagggctccaaagtcctattgccaacaaaaaaacaacgcaagacattaaacaacttttttcaagcccatctgtatttaaaaaaacagtgcaaaatgtttctgtgggactggtttacgggaatgctgggatatctaggattgtggaagaaacctggaaaactattattcttaggactggataacgcaggcaaaactacccttctacatatgctcaaggatgacagactggcccagcatcttcccacgttacatcccacatcagaggagctttccattggtaacatgaggtttacgacgttcgatttggggggccacgagcaggctaggagagtgtggagggactactttccagcagtcgatgccatagtgttccttgttgatgccaacgacagctcaagatttgtagaaagccaggaacagctaaatgccctcctctcagacgaaactctatcaaactgtccaatacttatcttaggtaataaaattgatctcccaggtgctgcttcggaagatgaattacgaactagattcggcttgtttggccaaaccacaggcaaaggcaaagtagccagaaatgatctacccggtaggcctctagaactatttatgtgctctatactcaaaagacaaggttatggagaaggtttccgttggttggcacaatatatcgattaattatgtatttttccatttcgttctgtcattg

SEQ ID NO: 66 - DNA, 22 bp, Artificial Sequence
  primer
  misc_feature (1)..(22): forward primer
ttgaaaaagatagggctccaaa

SEQ ID NO: 67 - DNA, 22 bp, Artificial Sequence
  primer
  misc_feature (1)..(22): reverse primer
caatgacagaacgaaatggaaa

SEQ ID NO: 68 - DNA, 2438 bp, Diabrotica virgifera
  misc_feature (1)..(2438): WCRW transcript ta00303.001_diavv
ggggggaaaaagatagggctccaaagtcctattgccaacaaaaaaacaacgcaagacattaaacaacttttttcaagcccatctgtatttaaaaaaacagtgcaaaatgtttctgtgggactggtttacgggaatgctgggatatctaggattgtggaagaaatctggaaaactattattcttaggactggataacgcaggcaaaactacccttctacatatgctcaaggatgacagactggcccagcatcttcccacgttacatcccacatcagaggagctttccattggtaacatgaggtttacgacgttcgatttggggggccacgagcaggctaggagagtgtggagggactactttccagcagtcgatgccatagtgttccttgttgatgccaacgacagctcaagatttgtagaaagccaggaacagctaaatgccctcctctcagacgaaactctatcaaactgtccaatacttatcttaggtaataaaattgatctcccaggtgctgcttcggaagatgaattacgaactagattcggcttgtttggccaaaccacaggcaaaggcaaagtagccagaaatgatctacccggtaggcctctagaactatttatgtgctctatactcaaaagacaaggttatggagaaggtttccgttggttggcacaatatatcgattaattatgtatttttccatttcgttctgtcattgagttaggatattaatgtttgaggaactattggcaacactgcaactacctgattcatttcagatcttaggtactttacataaatatctaaatatagatgttggcaatgtaattttgaacaacagtatatacattcaatgtaaattatatatttttagttaagttaccttcttaaatggtgtttgagtggctatggtactgaaatagtttgactttttgtgttcttcgataactaaaaatgatttcttgtggaaagttacactcagaattacatagttaacttctttatcagcagttgttgtcaagatttccattttgagacgattgttttgtaaattaggtgggaatttttaaaatgttggactgttttttaacatgcctttctcaacttttgttacaaataatgttttgtccagttgtaaatgttttatttaactagagactttctaggttgtgttaataatagtcattggtcaaatacgatagaagccaaaatttgaagaaaaggaacaatgtactagggtggtccgataagtattttgccttcaaaagaaaagtggcgatttatttttcaatattgtctccttctagctcaatacacgtgacccagcgaggcttcacccagattcagcggcttcaatttctgaaggtctgtaaagtagacatcaatagcagcgatgaactcactaaatcgacttacatttctgcccgacgagtgacttttcaaatttggaaacgaaaagaaatcgcacagggccaaatctggagaatacagtggatgggatagtagttagtagtccgaatcgaaaaatttggccatggcgacggcgaaggtgtgagcgggtgcgttgtcgtggaagagtactttttatcttccccaattggggctgttttttctgcaagtcggtgtcgaatcgacccaataattcgccaaagtaaagccctgtgaccgttttgccctttttttcaggaagctgatatatatcacactttgtgaatcccagaaaacggtggtcatcacttttcggtcgttaggacagtctttgccttcttcggagtatgttcgcggggcgacgtccactgtatcaactgttccttggtttctggtgagtactggtggatccaagtttcatcgatgattatgaaacaatgtataaacaataggaaggtttaatttatttctaattctgagtaggaatggtcacttaaaggttttgtaatttaacttaagtacctaatgaatttattttggactttttcaagcttggctatatggacttcataagcgggtgaccaaacaactgagcaatactcaagaacagatctaactagggaaatgtaaatcagtctgattgaattaatgttatgcaaacatctagaagttctaataatgaagcctaacatgtgaaatgccgcaccaaccacatcaacacaatgcgcataaacaaaataatgaagaatataactcaaaaaacagatacagcacaggtgacacaacacacagcagtcaagcacaaagtgaaagcacaaaaaactacaaaaccaaaaaacaagaacaaaatcacaggcaaatatcaaacgaagtgaattattcaacaaaccaaaaataaaccaaatgccacacccagtcaaaacaaaacaacgaaggttgagattttgacatagataggccatctacaagaatgtattacatatacagggtgcgccaagcctctggtttt

SEQ ID NO: 69 - DNA, 619 bp, Diabrotica virgifera
  misc_feature (1)..(619): RNAi target sequence
tcggtcgatttaggtagtaggtgtaataaattttgaaagtgataaagacagtttgtgataaactgtagtgcagttcttttcgtttattttctcacctctcacataacaattaaactgaaacaatggcccccccgggtatcgggaattcggtggagatccgccccgaggcgacagcatcgtcggcagagaggagcagtagcaacggagtcgctacattccaaaaggacatcgtcgttttggatgggggcttcgctactcaattaggctgccacgtccaacaaccgattgatggagacgtcctatggagttccaggttcttggccaccaatccagaggctgttattgatactcacttagattttctcagagctggtgcggatgtaattattactaacacatatcaagcagatgtcaacttgtttgccaaacatctcaatatgaccaaagaagaaggatacaacttaataaaagactcagtgaagatggccaaaacagctgttgaaagatatttaaaagaatatccggaagcaagaaaacctcttatagctggttcagtgggtccttacggagcttcactacatgatggttcggaatacacaggagcctatgcgaaaactac

SEQ ID NO: 70 - DNA, 23 bp, Artificial Sequence
  primer
  misc_feature (1)..(23): forward primer
tcggtcgatttaggtagtaggtg

SEQ ID NO: 71 - DNA, 22 bp, Artificial Sequence
  primer
  misc_feature (1)..(22): reverse primer
gtagttttcgcataggctcctg

SEQ ID NO: 72 - DNA, 1246 bp, Diabrotica virgifera
  misc_feature (1)..(1246): WCRW transcript ta08045.004_diavv
ggtcactcgtcgccgactgccgacttgatcggtcgatttaggtagtaggtgtaataaattttgaaagtgataaagacagtttgtgataaactgtagtgcagttcttttcgtttattttctcacctctcacataacaattaaactgaaacaatggcccccccgggtatcgggaattcggtggagatccgccccgaggcgacagcatcgtcggcagagaggagcagtagcaacggagtcgctacattccaaaaggacatcgtcgttttggatgggggcttcgctactcaattaggctgccacgtccaacaaccgattgatggagacgtcctatggagttccaggttcttggccaccaatccagaggctgttattgatactcacttagattttctcagagctggtgcggatgtaattattactaacacatatcaagcagatgtcaacttgtttgccaaacatctcaatatgaccaaagaagaaggatacaacttaataaaagactcagtgaagatggccaaaacagctgttgaaagatatttaaaagaatatccggaagcaagaaaacctcttatagctggttcagtgggtccttacggagcttcactacatgatggttcggaatacacaggagcctatgcgaaaactacttcggcagaaaccatgagagaatggcacgggcccagaataaaagccttggtggaaggaggagttgatctcttagcaattgaaactattccgaatgcagttgaagctgagatgttggtccagttaataaaagaagaatatcctaatgttaaagcgtggcttgcttttagtgtagcgcaagacggaaaatcaatagcctacggagaagacttcaaaacaatcgcccgaaaatgttatgactccaatcctgagcaattagtagccataggaatcaactgcacggccccacgactaatcgaaccccttctcaccgggataaatgatgatagaaaagacaacccccgaccacttattgtctaccctaacagcggagaaagttacaatgtcgaactcggggatgattccagatggcataaccgagaaaactgcgagccagtagacacaaatattcacaaatggttagatctgggagtcacgtgggtcggaggctgctgtagaacctacgccgtggatgtcacaagaatacgcgaccaagtgcagttatggaaggagaaacagtagctaaactttgaatttatattttaatttttatttttaataa

SEQ ID NO: 73 - DNA, 680 bp, Diabrotica virgifera
  misc_feature (1)..(680): RNAi target sequence
attgtcaacctggaaaacgacttgtcgaagtcgcatagtttttataagtttaaataaactaaattaaatataaatacttcgagaatgcaataattattattctttaactagacccacagcttattaattagcagaagtagtagcagacttatactaactagcataaggagaaacatattaacatagcatggcagacttcatagattctgaagcagaagaaagtagtgaggaggaggaattagatcatagggatcgtaaaaaagcccaaaaagccaaagttgtagatagttcagatgaagatgatgaagatgatgacgaaagactgagagaggaattaaaggatttgattgatgataatcctattgaagaaagtgatgctgagtctgatgcttcaggaagggaaaaacgtaagaaatctgacgacgaggatttggatgatcgactggaagatgaagattatgatttgcttgaagaaaatttgggtgttaaagttgaaagaaggaaattcaagcgactgcggcgttttgaagatgaagaaagtgaaggagaagaagaacatgatcctgaacaagatagggaacaaattgctatggatatattttcagatgatgacgatgaaagacgatcagaacgaagtcacaggcctgccgtcgaacaagaaacttatggtgtaggcgagg

SEQ ID NO: 74 - DNA, 22 bp, Artificial Sequence
  primer
  misc_feature (1)..(22): forward primer
attgtcaacctggaaaacgact

SEQ ID NO: 75 - DNA, 22 bp, Artificial Sequence
  primer
  misc_feature (1)..(22): reverse primer
cctcgcctacaccataagtttc

SEQ ID NO: 76 - DNA, 6054 bp, Diabrotica virgifera
  misc_feature (1)..(6054): WCRW transcript ta02840.001_diavv
agtttaaataaactaaattaaatataaatacttcgagaatgcaataattattattctttaactagacccacagcttattaattagcagaagtagtagcagacttatactaactagcataaggagaaacatattaacataacatggcagacttcatagattctgaagcagaagaaagtagtgaggaggaggaattagatcatagggatcgtaaaaaagcccaaaaagccaaagttgtagatagttcagatgaagatgatgaagatgatgacgaaagactgagagaggaattaaaggatttgattgatgataatcctattgaagaaagtgatgctgagtctgatgcttcaggaagggaaaaacgtaagaaatctgacgacgaggatttggatgatcgactggaagatgaagattatgatttgcttgaagaaaatttgggtgttaaagttgaaagaaggaaattcaagcgactgcggcgttttgaagatgaagaaagtgaaggagaagaagaacatgatcctgaacaagatagggaacaaattgctatggatatattttcagatgatgacgatgaaagacgatcagaacgaagtcacagacctgccgtcgaacaagaaacttatggtgtaggcgaggaagaagaggaaggggagtactcggatgccgatgattttatagttgacgatgacggtagaccgatagctgaaaaaaaaaaaaaaaaaaaaaaaaaaaaaacagatgccgctctccaagaggctcaagaaaccttcggtgtcgattttgattatgatgaatttagtaaatacgatgaagatgattacgaagatgaagaggaggaggatgacgaatacgaggaagatgatgtagagaaaaggaaacggcctaaaaagacttcaaagaaaaaaccgacgaagaaatccatttttgaagtgtatgaacctagtgaacttaaaagagggttctttaccgatctcgataatgaaatccgaaacactgatattcccgaaagaatgcaacttcgtgatgttccaatcaccgctgttccggatgactcaactgaacttgatgatgaagcagaatggatttacaggcaagcgttttgtaacagaactgtttccaatgtggattctcatttatcatcagaggcaagagagaaattaaagaagactcatcatgccatcggaaaaatcagaaaagcattagattttataagaaatcaacaattagaagtaccgtttattgctttttatagaaaggagtatgttcaaccggaacttaatattaacgatttgtggaaagtatataaatacgatgcaaagtggtgccaattgaaaacacgcaaagaaaacctcttgaagctttttgaaaaaatgaggtcatatcaaactgaccacataatgaaagatccagatgcaccaattccagacaaccttcgtatcatgactgagtccgacattgagcgattgaaaaatgttcaaaccgccgaagagttaaatgacgttcacaatcatttcattttatattatgctgcagatttgccagccatgcatgccgcgtggagagtcaaagaaagagaaaggagaagacaggaaagaaaggaggctagacttaagctcatcgctgaaagtgaagaaggtgctgaaattcctgaagagcctgaggaaattgacgatgatgaaccagaagctgaaaccttaaaatacgccaatagatcaggcagctatgcactatgtaataaaggaggtttgggtcctctagcgaagaaatttggtttaacgcctgaagaatttgccgaaaacctgagagataattatcagaggcacgaagtagatcaagaacatatagaacctgtagaagtcgctaaagaattcgtatcgccgaaatttcctacagtggaagaagtgttgcaagctactaaacacatggtagctttacaaatagcaagagaaccattagtaaggaaatgcgtaagagaaattttctttgaacgagctagattaaacgtttatccaaccaaaaagggtgtgaaagttatagatgaagctcataattgctatagtatgaagtatgtaaaaaataaaccagtaagagatcttgcaggcgaccaatttttaaaattatgtttagccgaagaggagaacctccttactattaccatcaatgaccatattcaaggaaacactactaacaattacattgatgaagtcaaacaattatatataaaggatgaattcagcaaacacgttcaggattggaatgcgctaagaatggaatcggtagaaagggctttaacgaaaagtgtcttaccagatttaagatctgaattaaaacgaacgttgctcacagaggctaaagaattcgtattaaaagcttgctgtagaaaattatataattggataaagattgctccatacgcaataacttttcccgatgaagacgaagatgattgggatacatccaaaggtgttagaactatgggtgtagcatacgtaccagagcacacagtatcagcttttacctgtatttcagcaccagacggagatataactgattatctcagattaccaaatattctaaaaagaaaaaatagctttcgaactgaagaaaaacttatgaaggaagctgatcttcaagcactgaaaaatttcatattccttaaaaagcctcatgtgatagcagtagggggtgagtccagagaagccttaatgatcgctgatgatatcagaggagtaataagtgaactaatagaatccgaccaattcccacagattagggttgaaattattgataatgaattagccaaagtgtacgcaaattccattaaaggttcaactgatttcagagattatccagagttgttaaggcaagctatttcattagctcgaagaatgcaagatcctttggttgaattttcccaattatgtaatagcgatgaggaaattttgagtctgaggtttcatcccttgcaggaacaagtccagaaagaagaactactagaagctctctgtttagaatttgtcaacagaacaaatgaagtaggtgtagatataaatcttgccgttcagcagattcataaaaagtagtttagttcaattcatatgcggtctaggaccgcgtaaaggtcaagcgttacttaaagttctgaaacaaactaatcagaggcttgaaaacagaacccaattggttacattttgtcatatgggtccaaaagtttttattaattgttctggattcataaagattgataccaatagtttaggagacagtactgaggcatatgttgaaatattggatggctctcgagttcatcccgaaacttatgaatgggcacgaaaaatggctgtggatgctttagaatatgacgatgatgagggagctaatccggcgggagctttagaggaaattctcgaggcgccagagaggttaaaagatcttgacttggatgcatttgcggaggaattggaaagacaaggaatttggtaacaagagtataacattgtatgacattagagcagaactgaactcgcgatataaagatttgagacaaccttttcgttctgcaaatcctgaagaactattcgatatgcttactaaagaaactcccgaaacattttatattggaaaaatggttacatctaccgtgtttggcattgcaaggagaaaaccaaagtcagaccagctcgatcaagctaatccggtccgtaatgacgaaactggtttgtggcagtgccccttctgtttgaaaaatgattttcctgaattatctgatgtatggaatcattttgatgcaggagcatgtcctggtcaagctactggagttaaactaagactggataatggtatattaggttatatttatataaaaaatataagcgacaaaccagttgctaatccggaagaaagagtaggcataggacaattaattcactgtagaataataaaaattgacgtagagaagtttagtgttgattgtacatcgaaatctagcgatcttgctgataaaaatcatgaatggagacctcaacgagatcctcattatgatcaagaacgtgaagacaaagacaatcgattagaagccgagaagaagaaagagaaacagcgtatgacgtacatcaagagggttatcgttcatccggcgttccataacatatcctatgccgaagccgaaaaatgtatggttaatatggaccagggtgaagttatcattaggccttcgaggaagggcccggaacaatcgaacataacgaagaaggttaaggaaggaacatatcaacacaaagatactaaagaaaaacgaaaactgaacaatggtacattaggaaaatcattatggattggaaatgaagaatttgaagatcttgatgaaataatagctaggcacgttacaccaatggcggcgcatgctagagatttactgtattttaggtattacaaagatttccaaggtggtcataaagataaggctgaggaatatctaaaagatgaaaaaaagaaaaatgcttctaaaattcattatgtagttagtgctgctaagaatatacctggtaaatttcttctttcgtaccttccacgcaacaaagttagacacgaatatgtaacagttactccagaaggctttcggtttagacaacaaatgtttgattccgtttcttcgttatttaaatggttcaaagaacatttccgggagcctccaccaggcggtgcaacaccaggtagcacgccaaggatggcttcaagcagaactggatatggaagtgccacacccgcgtatagtatgaataatgaagctattcaaagagttgctcaaaatttaccaagtcatgtagttcaagcgttatctgctgccaccaaccaaactccacattatccccacacccctggttatggaggcaattatattaatacgccttacactccaagtggtcaaactccatacatgactccgtacgctacaccccatacgcagcaaactccccgctatggtcatcaaacaccttcccaacacatggcgagctcagcaccacaaggtctcaacaatccctttttacatcctggcgcggtgactccctcccaacgaactcctatttatcgcaaccatcctgcacaatctccagtaatgcttcctacaagccctgtaccaagtccaggttcccagagttcatacagtagtcatttaagtcataatcagcgaagtggaagttatgctgaatccttaagattccaacctcccgaatcgccgagaagctcagtgagtaatagaagctttcaaactgatagatacggcggtgataggtatggtaaaggaggaagtcatagatatggtggaagctcaaacgaagatagatatggtaagggaggaggaggaaatgaaaatacggattggcagaaagctgcagaagcatgggctcgatctagatctactccgagaagtgatggccgtaatactccaagatctgtaggtcaacgaactcctagatacgacaacgacgccgaacgttctagaatgaaacacctcagcaagagcccgaggtctgttaggtctactcctcgaaccaatacatctccacattctatgtccctaggtgatgctacccctctgtatgacgaaagtatctaaattactttgtatttggttatatagtagggtaacagtgatattgtaaatgctaaaatcaacaatacagattcgcgatattaagtcacaatgacgacctctcgtgtatttcggctgaactagcatcgaggggtcttttcaatgtcaaacgctgagcgcacatgcatttgaaacaagtaggcaatattcacttatttatttttacatgttttaaattaattattgggtaatataaaatgattaacatggaatcttcacgtttcaataaaagttggcgtcgatattgtatataaaattaaaaaaaatatgtaaaaataaataatattacctacttgtctcaaatgcacgtgcgcccagcgtttgacattgaaatcaccctcaaagctagttcagacgaaatagacgagaggtcgtcgttgtgacttaacatcgtgaatagaaa

SEQ ID NO: 77 - DNA, 319 bp, Diabrotica virgifera
  misc_feature (1)..(319): RNAi target sequence
tggtaagggaggcaaagttaagggaaaagcaaagtcccgatcaaatcgtgctggtttacaatttcctgtaggtcgtattcatcgtttattgagaaaaggaaattatgccgaaagagttggtgctggagctcctgtatacttggcagctgttatggaatatttagctgctgaagttttggaattggcaggaaatgcagctagagatagcaaaaagacccgtataattcctagacatttacaattggccataagaaatgacgaggaattgaacaaattactgtcaggagttaccatcgcccaaggtggagtattgcctaat

SEQ ID NO: 78 - DNA, 22 bp, Artificial Sequence
  primer
  misc_feature (1)..(22): forward primer
tggtaagggaggcaaagttaag

SEQ ID NO: 79 - DNA, 22 bp, Artificial Sequence
  primer
  misc_feature (1)..(22): reverse primer
attaggcaatactccaccttgg

SEQ ID NO: 80 - DNA, 456 bp, Diabrotica virgifera
  misc_feature (1)..(456): WCRW transcript ta07804.001_diavv
gggggaagggaggggagtattcacttgatcttcaaggtagattaacgcaagtagaaatctaaaacatgtctggacgtggtaagggaggcaaagttaagggaaaagcaaagtcccgatcaaatcgtgctggtttacaatttcctgtaggtcgtattcatcgtttattgagaaaaggaaattatgccgaaagagttggtgctggagctcctgtatacttggcagctgttatggaatatttagctgctgaagttttggaattggcaggaaatgcagctagagataacaaaaagacccgtataattcctagacatttacaattggccataagaaatgacgaggaattgaacaaattactgtcaggagttaccatcgcccaaggtggagtattgcctaatatacaagcagtacttttacctaaaaagaccgaaaaaaaaaaaaaaaaaaaaaaaaaaaaaa

SEQ ID NO: 81 - DNA, 759 bp, Diabrotica virgifera
  misc_feature (1)..(759): RNAi target sequence
atcatcctctgtgtttccgttttgaacttaacttgtatttagtttaaaaaataatcatgtctagaggaagcagtgcaggttttgaccgacacataacaattttctcgcccgaaggccgactctatcaagtagagtatgcttttaaagccattaaccaagccggccccacttcggtagcagtccgaggagtagatgctgcggcgtgtgtgacccagagaaagatcccggataagctgattgatcccaacacaattacacatctgttccagttaacagaacacactggatgtgtgatgactggcatgattgctgacagcaagtcccaggtgcagagagctagatatgaggctgccgagttcaaatataagtttggatatgagatgccaatcgatgccttgtgtaggagagtatcggatatttcccaggtttatacgcagaatgctgagatgagacctttgggttgctccatgcttctgataggatatgaccaagaaatgggaccatgtgtccacaaagctgaccctgctggctattactgtggctacagagcagtaagtgtaggatccaaacaaactgaagccaacagctacctagagaagaagctaaagaagaaaactgatctgtccaaagatgaagtcatccaattggcaatcagttgtctttcaagtgttttatctgtagattttaaaccaacagaagtcgaagttggggttgttactaaggatgagcccaagtttaggaaattgacggaacaagaaa

SEQ ID NO: 82 - DNA, 22 bp, Artificial Sequence
  primer
  misc_feature (1)..(22): forward primer
atcatcctctgtgtttccgttt

SEQ ID NO: 83 - DNA, 22 bp, Artificial Sequence
  primer
  misc_feature (1)..(22): reverse primer
tttcttgttccgtcaatttcct

SEQ ID NO: 84 - DNA, 957 bp, Diabrotica virgifera
  misc_feature (1)..(957): WCRW transcript ta04410.001
ggggccccgggggacagaagacagaacgtgacaacagaaaaatatagaaaatcatcctctgtgtttccgttttgaacttaacttgtatttagtttaaaaaataatcatgtctagaggaagcagtgcaggttttgaccgacacataacaattttctcgcccgaaggccgactctatcaagtagagtatgcttttaaagccattaaccaagccggccccacttcggtagcagtccgaggagtagatgctgcggcgtgtgtgacccagagaaagatcccggataagctgattgatcccaacacaattacacatctgttccagttaacagaacacactggatgtgtgatgactggcatgattgctgacagcaagtcccaggtgcagagagctagatatgaggctgccgagttcaaatataagtttggatatgagatgccaatcgatgccttgtgtaggagagtatcggatatttcccaggtttatacgcagaatgctgagatgagacctttgggttgctccatgcttctgataggatatgaccaagaaatgggaccatgtgtctacaaagctgaccctgctggctattactgtggctacagagcagtaagtgtaggatccaaacaaactgaagccaacagctacctagagaagaagctaaagaagaaaactgatctgtccaaagatgaagtcatccaattggcaatcagttgtctttcaagtgttttatctgtagattttaaaccaacagaagtcgaagttggggttgttactaaggatgagcccaagtttaggaaattgacggaacaagaaatagatttccatctgacagctattgctgagagggattagatagattttttatattcactctttgtaatgttaagaaatggtcaaattttgagttaagtaagaaataaatttttctcttataaaaaaaaaaaaaaaaaaaaaaaaaaaaa

SEQ ID NO: 85 - DNA, 587 bp, Diabrotica virgifera
  misc_feature (1)..(587): RNAi target sequence
aactttgtgtgttttggcaggtccgatggctgcaataagaaaaaaattggtgattgttggtgacggagcatgtggaaaaacatgtcttttaatagtatttagtaaagatcagttcccagaagtatacgtgcccactgtattcgaaaactatgtggcggatattgaagtagatggaaagcaggtagaactcgccttatgggataccgcaggtcaagaagattatgatcgtctgcggcccctttcatatccagacaccgatgtgattttaatgtgcttctcagtagactcccccgactcattagaaaacatcccagaaaaatggaccccagaggtaaaacacttttgtccaaatgtgccaattattctggtaggcaataagaaggatctgcgtaacgaccctactaccattaacgaacttaaaaagatgaaacaagaaccagtaaaacctcaagacggaagatccatggcagagaaaatcaatgcttttgcatatctagaatgttctgccaaaagtaaggagggtgtaagagaggtttttgaaaatgctacccgagctgcactgcaagtcaaaaagaagaagaagcccc

SEQ ID NO: 86 - DNA, 22 bp, Artificial Sequence
  primer
  misc_feature (1)..(22): forward primer
aactttgtgtgttttggcaggt

SEQ ID NO: 87 - DNA, 20 bp, Artificial Sequence
  primer
  misc_feature (1)..(20): reverse primer
ggggcttcttcttctttttg

SEQ ID NO: 88 - DNA, 1530 bp, Diabrotica virgifera
  misc_feature (1)..(1530): WCRW transcript ta15897.001_diavv
ggggatttaatgtccgccattttcgttcgtagttgaataggcgttaactttgtgtgttttggcaggtccgatggctgcaataagaaaaaaattggtgattgttggtgacggagcatgtggaaaaacatgtcttttaatagtatttagtaaagatcagttcccagaagtatacgtgcccactgtattcgaaaactatgtggcggatattgaagtagatggaaagcaggtagaactcgccttatgggataccgcaggtcaagaagattatgatcgtctgcggcccctttcatatccagacaccgatgtgattttaatgtgcttctcagtagactcccccgactcattagaaaacatcccagaaaaatggaccccagaggtaaaacacttttgtccaaatgtgccaattattctggtaggcaataagaaggatctgcgtaacgatcctactaccattaacgaacttaaaaagatgaaacaagaaccagtaaaacctcaagacggaagatccatggcagagaaaatcaatgcttttgcatatctagaatgttctgccaaaagtaaggagggtgtaagagaggtttttgaaaatgctacccgagctgcactgcaagtcaaaaagaagaagaagccccgttgtgtaatgttttgagccactacatattctatattttatattaataatcgttacgtgtgttaattaatttcaagggggcttctgcatgatgtattgactaacaaaataaacccctacttttctcttcagttctatttgttcaaactccttttctccttgtggacaaatttaagtattaagttatattttcatatgtatttaacccattgtttattggttcttagagttacacgacccagaaatttaattttaaaacaacacaacgatgtagcaagttactttttagagtttaatatagaatagatcattattttgtttctttattccccaccaaactagtattgcacattgcaattatttggctatgaattttaattgattaatgtaaaattttgatttttgaaatatccttagttgtctcgatttttgatgaacttccagtgaggggtgtgtaacttataagctttttttatacaatggtaaatgatataatcagtgtcatgtgcacaaaacttattgaacgtccacttagatcatcattgtagtactaatttacaagcatacgttgattcattttatagtatttatattttataacctgatcaatatattttgtttcaaaaatttttttctgtatctatagttatcttttacagatattcagagtacccattgatttttatttagttcaatgactgcagcacatttattatgttttgattagaagtcactgcaaatgaaacaagtggattaaaacttttgactaacagatacacaaaaaaatgtttgtgttgcagttattgcactgggactaaaaggactaacagtgatgtcatctcttgtgtaagggtagttactaccacctgttgtcctttaagtctcaaaattaattttga

SEQ ID NO: 89 - DNA, 444 bp, Diabrotica virgifera
  misc_feature (1)..(444): RNAi target sequence
cggcgttgtaaaccttttgtaaacattaaacattttgaaaattactgtattgctgcagcgatttacgtagaagtattttaagatgaatgcgcctccgacctttgaatcgtttttattatacgatggagagaaaaagatcattctagaacaagatacgaaagttccaaatgcagccatttttactatcaacaaagaggaccacacacttggtaatacgatcagaaaccaacttttaaaagatcccaacgtattattcgctggttacaaactacctcatccattggaacacaaatctgtcttgcgaattcaaacaacatcagactattcacctcaagaagccttaatgcacgctatcactgatttaatttcagaattgtccttgttcgaagaaagatttaaggaagcgatcaaagaaaagaaggaaggattggattaggcagtgaa

SEQ ID NO: 90 - DNA, 21 bp, Artificial Sequence
  primer
  misc_feature (1)..(21): forward primer
cggcgttgtaaaccttttgta

SEQ ID NO: 91 - DNA, 22 bp, Artificial Sequence
  primer
  misc_feature (1)..(22): reverse primer
ttcactgcctaatccaatcctt

SEQ ID NO: 92 - DNA, 575 bp, Diabrotica virgifera
  misc_feature (1)..(575): WCRW transcript ta06570.001_diavv
caaataacaggaaattgacactgacagttcgttggacaggaatgattttttcggcgttgtaaaccttttgtaaacattaaacattttgaaaattactgtattgctgcagcgatttacatagaagtattttaagatgaatgcgcctccgacctttgaatcgtttttattatacgatggagagaaaaagatcattctagaacaagatacgaaagttccaaatgcagccatttttactatcaacaaagaggaccacacacttggtaatatgatcagaaaccaacttttaaaagatcccaacgtattattcgctggttacaaactacctcatccattggaacacaaatttgtcttgcgaattcaaacaacatcagactattcacctcaagaagccttaatgcacgctatcactgatttaatttcagaattgtccttgttcgaagaaagatttaaggaagcgatcaaagaaaagaaggaaggattggattaggcagtgaatttttactttgatttagcttttgtaattaaggttaatgtgactaataaatatagttttattcaaaaaaaaaaaaaaaaaa

SEQ ID NO: 93 - DNA, 453 bp, Diabrotica virgifera
  misc_feature (1)..(453): RNAi target sequence
ctggttgtcataggttgtacgcagttaaattttttgtgataaaacttagtgttcctttgttatcaattaacatatataaaaatagtaatggctagtcggaagaagactttgttgaaggtcaccatcctgggtgattccagtgtgggaaagacttccttgatgaaccagtacgtaaataggaaattctccaaccaatacaaagcgaccataggtgctgatttccttacaaaagaactcacagtggacgatcgaactgttacaatgcaaatatgggatactgcaggtcaggaaaggtttcagtccttaggtgtagccttttacagaggggcagactgctgtgtgttagtatttgatgtaacttcccccacctcattcaaatccctggacagttggcgagacgaattcctcatccaagcatcgccccgagagccagaaaacttcccattgacctca

SEQ ID NO: 94 - DNA, 22 bp, Artificial Sequence
  primer
  misc_feature (1)..(22): forward primer
ctggttgtcataggttgtacgc

SEQ ID NO: 95 - DNA, 22 bp, Artificial Sequence
  primer
  misc_feature (1)..(22): reverse primer
tgaggtcaatgggaagttttct

SEQ ID NO: 96 - DNA, 640 bp, Diabrotica virgifera
  misc_feature (1)..(640): WCRW transcript ta40942.001_diavv
tagtaatggctagtcggaagaagactttgttgaaggtcaccatcctgggtgattccagtgtgggaaagacttccttgatgaaccagtacgtaaataggaaattctccaaccaatacaaagcgaccataggtgctgatttccttacaaaagaactcacagtggacgatcgaactgttacaatgcaaatatgggatactgcaggtcaggaaaggtttcagtccttaggtgtagccttttacagaggggcagactgctgtgtgttagtatttgatgtaacttcccccacctcattcaaatccctggacagttggcgagacgaattcctcatccaagcatcgccccgagagccagaaaacttcccattgacctcaagcgttattatccttataatacccttggtaccttaataactataagtacaagaagattccactataatattgttacaaattaagaaagtaacatattagatatattcaatcctttatatctctgaaaatattaaaaaaagcatacatctgatttacaaaagaaataagttgtaaaaatgcataagctctcagctgtaaatgtttttttgtgtcctttagtattattccagtgtttttaatatatctcataatattggaatattttttaa

SEQ ID NO: 97 - DNA, 601 bp, Diabrotica virgifera
  misc_feature (1)..(601): RNAi target sequence
gtgaacgccattgtgaactctaacgactttggaaccaagctgaagtaatccgtgattttttgtgccatcggtgtttcctagtactttttattcacaagtttaaattcaaaaaatcatggctggcgaacaagatatgcccaccttcaaatgcgtcttggtcggagatggaggtactggcaaaactacctttgtaaaaagacacatgactggtgaattcgaaaagaaatatgtagcaaccttaggagtagaagttcaccctttagttttccacacaaatagaggacaaattcgttttaacgtatgggacacagcaggccaagaaaagtttggtggtctgcgtgatggatactacatccaaggacaatgtgccataattatgtttgatgttacatctagagtcacttacaaaaatgttccaaactggcacagagatcttgttagagtttgtgaaaatatcccaattgtattgtgtggtaacaaagttgacatcaaagataggaaagttaaggcaaagagcattgtcttccataggaagaagaatttacaatactatgacatctctgcaaaatccaactacaactttgaaaaacccttcttgtgg

SEQ ID NO: 98 - DNA, 22 bp, Artificial Sequence
  primer
  misc_feature (1)..(22): forward primer
gtgaacgccattgtgaactcta

SEQ ID NO: 99 - DNA, 22 bp, Artificial Sequence
  primer
  misc_feature (1)..(22): reverse primer
ccacaagaagggtttttcaaag

SEQ ID NO: 100 - DNA, 1075 bp, Diabrotica virgifera
  misc_feature (1)..(1075): WCRW transcript ta05966.001_diavv
tatttggcgcgcattcctgacacctacgcgggtcttcttgtgaacgccattgtgaactctaacgactttggaaccaagctgaagtaatccgtgattttttgtgccatcggtgtttcctagtactttttattcacaagtttaaattcaaaaaatcatggctggcgaacaagatatgcccaccttcaaatgcgtcttggtcggagatggaggtactggcaaaactacctttgtaaaaagacacatgactggtgaattcgaaaagaaatatgtagcaaccttaggagtagaagttcaccctttagttttccacacaaatagaggacaaattcgttttaacgtatgggacacagcaggccaagaaaagtttggtggtctgcgtgatggatactacatccaaggacaatgtgccataattatgtttgatgttacatctagagtcacttacaaaaatgttccaaactggcacagagatcttgttagagtttgtgaaaatatcccaattgtattgtgtggtaacaaagttgacatcaaagataggaaagttaaggcaaagagcattgtcttccataggaagaagaatttacaatactatgacatctctgcaaaatccaactacaactttgaaaaacccttcttgtggttggctaggaaactcattggagatcccaacttagaattcgtagctgcacctgccttgcttcctccagaagtccagatggatccccaatggcagcaacaaatcgaaaaggatcttaaagaagcctcagaaactgcactgcccgatgatgacgaagatttataaactcattaaccaattactaaaactctgtcatcgttccaaagcgcgtgtgtaacaattgatatcttacaagacttaagttaaattacattttatgtatttctgaagcagaactgttgatatttttatataaatgttttctaaatttgttgaaaggtttgtctggagtctggacgtatgttcttcaatatattagtggtatggttgttagagtgttagagtcagcaagctaccgtaacagttcttgtcacataggagtgtagtcttaatttcaat

SEQ ID NO: 101 - DNA, 614 bp, Diabrotica virgifera
  misc_feature (1)..(614): RNAi target sequence
caacaattttcgcatctttctgtctgttcccggcgttctttgaaaaagttttcaataatactctaaaaaatggcagacgctgatgatctattagattatgaagatgaggaacagacagaacaaaccgcaactgaaacggcaactacagaggtacagaaaaagggtgtcaagggcacatatgtatcaatacacagttctgggtttagagattttctgttaaaaccagcaattctcagagctatagtggactgcgggttcgaacatccttcagaagttcaacatgaatgtattcctcaagctgtcattggcatggatattctgtgccaagctaaatccggtatgggaaaaacggctgtttttgtattagctacactccaagtaatagatcctacagaaaatgttgtatatgttctcgtcatgtgccataccagagagttagccttccagataagcaaagagtacgaacgtttcagtaaatatatgcccaatattaaagtaggggtcttctttggtggcttgcctatccagaaagatgaggaaacgttaaaaaataattgcccgcatatcgttgtgggtactccaggaagaattttagcattggtcagatcgaaaaa

SEQ ID NO: 102 - DNA, 22 bp, Artificial Sequence
  primer
  misc_feature (1)..(22): forward primer
caacaattttcgcatctttctg

SEQ ID NO: 103 - DNA, 22 bp, Artificial Sequence
  primer
  misc_feature (1)..(22): reverse primer
tttttcgatctgaccaatgcta

SEQ ID NO: 104 - DNA, 1515 bp, Diabrotica virgifera
  misc_feature (1)..(1515): WCRW transcript ta03347.002_diavv
ttggaaaacgcaatatatctatagaaaacaagcggtttatttgccgccattttgacaagcttacgtacctacatttttaattcgttgttttatttttagttttcaataatactctaaaaaatggcagacgctgatgatctattagattatgaagatgaggaacagacagaacaaaccgcaactgaaacggcaactacagaggtacagaaaaagggtgtcaagggcacatatgtatcaatacacagttctgggtttagagattttctgttaaaaccagcaattctcagagctatagtggactgcgggttcgaacatccttcagaagttcaacatgaatgtattcctcaagctgtcattggcatggatattctgtgccaagctaaatccggtatgggaaaaacggctgtttttgtattagctacactccaagtaatagatcctacagaaaatgttgtatatgttctcgtcatgtgccataccagagagttagccttccagataagcaaagagtacgaacgtttcagtaaatatatgcccaatattaaagtaggggtcttctttggtggcttgcctatccagaaagatgaggaaacgttaaaaaataattgcccgcatatcgttgtgggtactccaggaagaattttagcattggtcagatcgaaaaaacttaatctcaaacatctaaagcattttattttggatgaatgtgataaaatgttggagttattagacatgagacgtgatgttcaagaaatatatcgtaacactccccacgaaaaacaagtcatgatgttcagtgccaccttaagtaaagaaattagaccagtttgcaagaaatttatgcaagatcccatggaagtatatgttgacgacgaagctaaattaacattgcatggtctacagcaacattatgtaaaactaaaagaaaacgaaaagaataaaaagttatttgagttactagatgttttggagttcaaccaggttgtcattttcgtaaaatccgtacaaaggtgtgtggccctggcacaattactgactgaacagaacttcccagcgataggaattcacagaggaatggaccaaaaagaacgactgtcccggtatgaacaattcaaggatttccaaaagaggattctagtagccacaaacttatttggacgtggaatggatatcgaaagagtgaacatcgtcttcaactatgacatgcccgaagattctgacacttacctgcacagagtagcccgagctggacgtttcggtaccaaaggtctagccattactttcgtatcagaagagggagatgccaaaatattgaacgaagtacaagaaagatttgatgttaatattactgaattacctgacgaaatagatctcagttcatacattgaaggacgataagaatttcaagatctttgaagaattaattttaagatttagaataagatttccactaggtttaacgatttcaatttgtattatgtttcaatgttattgcattagtattaaaataaatgg

SEQ ID NO: 105 - DNA, 683 bp, Diabrotica virgifera
  misc_feature (1)..(683): RNAi target sequence
ggcatcttgtctcgtttatcgtaactcaaattaaacgtaaagatgtcgggaggaatcgaggctttaagccttaaagaggacgatgttaccaagatgttggcggcttccacccatcttggaacagcaaatgttgattttcaaatggaacagtatgtatacaaacgtcgtcatgacggtactcacatcatcaacttaaggaaaacgtgggaaaagattctcttggcagctcgtgccattgttgctattgaacaccctggtgaagttttcgtaatttcatctcgtccccatggccagcgtgctgttcttaagtttgctgctcacactggagctacccctattgctggaagatttactcctggtgcttttaccaatcagatccaagctgcattcagggaacctcgtctgttgatcgtcactgaccctgcttttgatcaccaacctatcactgaagcctcttacgtaaacattccagttattgctttgtgcaatactgattctccattacgttttgttgatattgccattcccggaaacaacaaagcctcacacagtattggtttactgtggtggcttttggctagagaggttctccgtcttagaggaatcattccacgggataccaaatgggatgttgtagtagatcttttcttctaccgtgaaccagaagaggctgaaaaggaaga

SEQ ID NO: 106 - DNA, 22 bp, Artificial Sequence
  primer
  misc_feature (1)..(22): forward primer
ggcatcttgtctcgtttatcgt

SEQ ID NO: 107 - DNA, 22 bp, Artificial Sequence
  primer
  misc_feature (1)..(22): reverse primer
tcttccttttcagcctcttctg

SEQ ID NO: 108 - DNA, 822 bp, Diabrotica virgifera
  misc_feature (1)..(822): WCRW transcript ta15911.001_diavv
gggggacagagacaggacataagcattaaaagggacgtaaaaacaacaaaggggctctttctcgtgcaaataacccaagtggcatcttgtctcgtttatcgtaactcaaattaaacgtaaagatgtcgggaggaatcgaggctttaagccttaaagaggacgatgttaccaagatgttggcggcttccacccatcttggaacagcaaatgttgattttcaaatggaacagtatgtatacaaacgtcgtcatgacggtactcacatcatcaacttaaggaaaacgtgggaaaagattctcttggcagcccgtgccattgttgctattgaacaccctggtgaagttttcgtaatttcatctcgtccctatggccagcgtgctgttcttaagtttgctgctcacactggagctacccctattgctggaagatttactcctggtgcttttaccaatcagatccaagctgcattcagggaacctcgtctgttgatcgtcactgaccctgcttttgatcaccaacctatcactgaagcctcttacgtaaacattccagttattgctttgtgcaatactgattctccattacgttttgttgatattgccattcccggaaacaacaaagcctcacacagtattggtttactgtggtggcttttggctagagaggttctccgtcttagaggaatcattccacgggataccaaatgggatgttgtagtagatcttttcttctaccgtgaaccagaagaggctgaaaaggaagaacaagctgccaaagaagctgtggctgctgttgtcaaacctgtagatatcccagctcctc

SEQ ID NO: 109 - DNA, 559 bp, Diabrotica virgifera
  misc_feature (1)..(559): RNAi target sequence
ggatggtttattgtctggaagctcattctaagtagattccgttttattaaagaactgttgaagggagcaagtgactctacaattacggaattgaaaaacactaggagtaaactcaagaggacaagaaaggactgatttatcttctcaaaatgaatattcgatgtgcaaaaccagaagatcttatgaacatgcagcactgcaatctgttatgtctaccagaaaactatcagatgaaatattacttttatcatggccttagttggccccaactaagttatgtagctgaagacgaaaaaggtaacatagttggttatgtcctagcaaaaatggaagaagaccaagaagatctcaagcatggtcacataacctccctggcagtgaagcgatcccacaggcgattagggctagcccagaaactgatggatcaagcttcagaagccatggtcgaatgtcttgacgcaaaatatgtttcgctgcatgttcgtaaaagcaatcgcgccgctttaaatctatacaaaaactctttgaaatttgaaactgtcgaaattgagccaaaata

SEQ ID NO: 110 - DNA, 22 bp, Artificial Sequence
  primer
  misc_feature (1)..(22): forward primer
ggatggtttattgtctggaagc

SEQ ID NO: 111 - DNA, 22 bp, Artificial Sequence
  primer
  misc_feature (1)..(22): reverse primer
tattttggctcaatttcgacag

SEQ ID NO: 112 - DNA, 903 bp, Diabrotica virgifera
  misc_feature (1)..(903): WCRW transcript ta05802.003_diavv
aaatatgcacttgtgacggcctttgacctaaatgtttagttaggaacaaaatggcgaaatgttggaactgataaacatcactgcctttttgtaatagttaagaattagatttttaattggaaaattgtaatgtagcaaattacttaagcgcctaactccaagacccattaatgcattcaggttaaacagtttattttatttaggatggtttattgtctggaagctcattctaagtagattccgttttattaaagaactgttgaagggagcaagtgactctacaattacggaattgaaaaacactaggagtaaactcaagaggacaagaaaggactgatttatcttctcaaaatgaatattcgatgtgcaaaaccagaagatcttatgaacatgcagcactgcaatctgttatgtctaccagaaaactatcagatgaaatattacttttatcatggccttagttggccccaactaagttatgtagctgaagacgaaaaaggtaacatagttggttatgtcctagcaaaaatggaagaagaccaagaagatctcaagcatggtcacataacctccctggcagtgaagcggtcccacaggcgattagggctagcccagaaactgatggatcaagcttccgaagccatggtcgaatgttttgacgcaaaatatgtttcgctgcatgttcgtaaaagcaatcgcgccgctttaaatctatacaaaaactctttgaaatttgaaactgtcgaaattgagccaaaatattatgcagatggtgaagatgcatattccatgagacgagacttatctgaattcgctaagaaagttaaacctaagtctgagactaaaaacgaagaatagtgtaattatttgtaatttttgtatttatagcgaatataatataca

SEQ ID NO: 113 - DNA, 368 bp, Diabrotica virgifera
  misc_feature (1)..(368): RNAi target sequence
ggttgcagaagatttcacaaaactttattatgatactctggataaacgacggcatttgatagcaagactgtatttggagacgggattattatcatggaatggtaatggtgtaactgggaatgaaaatattttgaaatttatgattgatttaccaccgtcatcttttactatacaaactctagacgcacagcctgttttagattctgcagtaaatggacaactgaccttcatcactcaagtgactggcagtgtaaaataccaagagaaaacaccaaaaacctttcagcgaaacttcataattacagcacagggcgataaatggaaaattgtcagtgattgtatgaggctgcaagaaccattaaacgcta

SEQ ID NO: 114 - DNA, 21 bp, Artificial Sequence
  primer
  misc_feature (1)..(21): forward primer
gttgcagaagatttcacaaaa

SEQ ID NO: 115 - DNA, 22 bp, Artificial Sequence
  primer
  misc_feature (1)..(22): reverse primer
tagcgtttaatggttcttgcag

SEQ ID NO: 116 - DNA, 470 bp, Diabrotica virgifera
  misc_feature (1)..(470): WCRW transcript ta08838.001_diavv
atttatgagaaatggaagatttaaggctaaaaattgatcaggcctgtaaggttgcagaagatttcacaaaactttattatgatactctggataaacgacggcatttgatagcaagactgtatttggagacgggattattatcatggaatggtaatggtgtaactgggaatgaaaatattttgaaatttatgattgatttaccaccgtcatcttttactatacaaactctagacgcacagcctgttttagattctgcagtaaatggacaactgaccttcatcactcaagtgactggcagtgtaaaataccaagagaaaacaccaaaaacctttcagcaaaacttcataattacagcacagggcgataaatggaaaattgtcagtgattgtatgaggctgcaagaaccattaaacgctaagaactaacaactgtatttttaagtattttgataaataaagtaattggtagac

SEQ ID NO: 117 - DNA, 589 bp, Diabrotica virgifera
  misc_feature (1)..(589): RNAi target sequence
acctggctgatgcaatagatttggtaaaagggttttctacctataaatttacaatatattattataaatagactaaactcatcaataaaaaagtttaagcaaatagccatatagctacaatggccgaagacgatgcaatctttgatccaaccctcaaaaaaaagaaaaagaagaagaagaccactttcgacattgatgctgctctagctgaaggtaacattgaaaatgattcagggaatgccccagctgcagaagctgataatattgaatcaaaacctgacgatgatcaggatgatggaaatgtggacattgatttagatttcactaaaaagaaaaagaagaagaaaaagcctttctcagctgatgatttagattcttccccagctgataataaagctgaaactactcaagatggagctggggacaatgatgggggtatggatgataactttgatttagatatggactttagtaaaaagaagaagaagaaaaccaagaaacctaagaatttagacgaacttattgcagaaactgaggagaaggatgatgatcaggagaatgtagatgaaaattcaacacaatgggtcaa

SEQ ID NO: 118 - DNA, 22 bp, Artificial Sequence
  primer
  misc_feature (1)..(22): forward primer
acctggctgatgcaatagattt

SEQ ID NO: 119 - DNA, 22 bp, Artificial Sequence
  primer
  misc_feature (1)..(22): reverse primer
ttgacccattgtgttgaatttt

SEQ ID NO: 120 - DNA, 1418 bp, Diabrotica virgifera
  misc_feature (1)..(1418): WCRW transcript ta00006.001_diavv
ggggtggagaagggtttcgtgtgaacagccgttgcacacgagtcagtcgatcctaagccctaggcgaaagccgatgttgatgtggttgggggacaacctggctgatgcaatagatttggtaaaagggttttctacctataaatttacaatatattattataaatagactaaactcatcaataaaaaagtttaagcaaatagccatatagctacaatggccgaagacgatgcaatctttgatccaaccctcaaaaaaaagaaaaagaagaagaagaccactttcgacattgatgctgctctagctgaaggtaacattgaaaatgattcagggaatgccccagctgcagaagctgataatattgaatcaaaacctgacgatgatcaggatgatggaaatgtggacattgatttagatttcactaaaaagaaaaagaagaagaaaaagcctttctcagctgatgatttagattcttccccagctgataataaagctgaaactactcaagatggagctggggacaatgatgggggtatggatgataactttgatttagatatggactttagtaaaaagaagaagaagaaaaccaagaaacctaagaatttagacgaacttattgcagaaactgaggagaaggatgatgatcaggagaatgtagatgaaaattcaacacaatgggtcaattccgatcgggactacacatatgacgaattactaaaccgtgcctttgaaataatgagagataaaaatccagatatggctgccggtaagaaacagaagttcgtcatgagacctcctcaagtagtcaaaatcggcgccaaaaagacgtcatttgcgaatttcacagagatatgcaaaatgcttcatcgtcaacccaagcatcttttagattttttactagctgaattgggtaccagcgggtctgtggacggtaataatcagctcatcattaaaggaaggtttcaacagaaacaaattgaaaatgtactcaggagatacatcaaggaatacgtcacttgtcatacatgtagatccccagatacaattcttcaaaaagacactagattgttcttcttacaatgtgaaacgtgtggttctaggtgttctgttgctagtattaaatcaggtttccaggctgtcacttccaaacgtgctgcaattcgagccaagacagcataggaaccttagatattgcaatacaataataaataggcactgttacagaagaaatttcaaagtgctaaagaataggtgttgtatgtgttatataatttgtactataaatctagctgaattgttaaatggaattaacaatcatattaatatcaacaattttaattatataacttttttattgattattaaattttaataaacagtaaataattatttatatttttcgtccataaaaaaaaaa

SEQ ID NO: 121 - DNA, 610 bp, Diabrotica virgifera
  misc_feature (1)..(610): RNAi target sequence
gtagcggaaccgtcaaaaagtcgggccctcgcaagagagttcgtcggggtaacccaaaaggacctggagacgtcgtcgagagatccgggaagaatctcgcactcttctcgaacaagccgaccgtgctcgtcgccaagctgaacaagaattgggagatgctcacgaacaattgaacgatcttggagcccaaaacgcttccttgtctgccgccaagaggaaattggaaaccgaattgcaaaccctccactcagaccttgacgaacttctcaacgaagccaagaactccgaagagaaggccaagaaggctatggtagatgccgctcgtctcgctgatgaactccgcgctgaacaagaccatgcccaaacacaagagaaactccgtaaagctctcgaagctcaaatcaaggacctccaagtacgcttggacgaagctgaagccaatgcccttaaaggaggaaagaaggctattgccaaattggaacaacgtgttagagaattagaaaatgaattagacggtgaacaaaggcggcacgcggatgcccaaaagaacttgagaaagtctgaacgtcgtatcaaggaacttagcttccaagctgaagaagaccgcaag

SEQ ID NO: 122 - DNA, 21 bp, Artificial Sequence
  primer
  misc_feature (1)..(21): forward primer
gtagcggaaccgtcaaaaagt

SEQ ID NO: 123 - DNA, 20 bp, Artificial Sequence
  primer
  misc_feature (1)..(20): reverse primer
cttgcggtcttcttcagctt

SEQ ID NO: 124 - DNA, 669 bp, Diabrotica virgifera
  misc_feature (1)..(669): WCRW transcript ta41130.001_diavv
gggcacacccattgggcgaaagggaatccggttcctattccggaacccggtagcggaaccgtcaaaaagtcgggccctcgcaagagagttcgtcggggtaacccaaaaggacctggagacgtcgtcgagagatccgggaagaatctcgcactcttctcgaacaagccgaccgtgctcgtcgccaagctgaacaagaattgggagatgctcacgaacaattgaacgatcttggagcccaaaacgcttccttgtctgccgccaagaggaaattggaaaccgaattgcaaaccctccactcagaccttgacgaacttctcaacgaagccaagaactccgaagagaaggccaagaaggctatggtagatgccgctcgtctcgctgatgaactccgcgctgaacaagaccatgcccaaacacaagagaaactccgtaaagctctcgaagctcaaatcaaggacctccaagtacgcttggacgaagctgaagccaatgcccttaaaggaggaaagaaggctattgccaaattggaacaacgtgttagagaattagaaaatgaattagacggtgaacaaaggcggcacgcggatgcccaaaagaacttgagaaagtctgaacgtcgtatcaaggaacttagcttccaagctgaagaagaccgcaagaaccacgaga

SEQ ID NO: 125 - DNA, 628 bp, Diabrotica virgifera
  misc_feature (1)..(628): RNAi target sequence
ccagtatttagaccggcatctcgtttttcccttattggaatttctgtccgcaaaaggaatttacaatgagaccgaactgttaaaagccaaattagatattctaagcaagactaatatgatagattatgctattgatatcagaaaacaactgtaccctgatcaggaaatacccgaggacctaaaacagaggcgtaatcatgttgtgcagcagctagcagagttgcaagaagaggttaagcctatccttaagattatggaatctgaagaagttatgaagaatatggaaaacatgagagattcgaaaacacttattacatatttgtcaaaagaattcaagtttgaaattgaattgatcgacagtcttcacaaactagccaaatacagatacgactgtggcaactacacagtatctacatcctacctgtacttctgtatgctggtattacctcctaatgacaggaactatcttagtgccttgtggggaaaattcgcttcagaaattctgtaccaaaactgggattcagccctggaagatctcaacaaactgagggaatatattgattccagtcccaatcagttttctggcaacagtttgcagcttctccaacagaggacttggttgatccat

SEQ ID NO: 126 - DNA, 22 bp, Artificial Sequence
  primer
  misc_feature (1)..(22): forward primer
ccagtatttagaccggcatctc

SEQ ID NO: 127 - DNA, 22 bp, Artificial Sequence
  primer
  misc_feature (1)..(22): reverse primer
atggatcaaccaagtcctctgt

SEQ ID NO: 128 - DNA, 1547 bp, Diabrotica virgifera
  misc_feature (1)..(1547): WCRW transcript ta05495.001_diavv
tttttagaggctacttctcgtagctctgcttgttgaattttaaaatattgaaagtagtaaatattgaagaaagtattaataacacaatcatggcaaagttcgacttaacttcgaagatgggccagtatttagaccggcatctcgtttttcccttattggaatttctgtccgcaaaaggaatttacaatgagaccgaactgttaaaagccaaattagatattctaagcaagactaatatgatagattatgctattgatatcagaaaacaactgtaccctgatcaggaaatacccgaggacctaaaacagaggcgtaatcatgttgtgcagcagctagcagagttgcaagaagaggttaagcctatccttaagattatggaatctgaagaagttatgaagaatatggaaaacatgagagattcgaaaacacttattacatatttgtcaaaagaattcaagtttgaaattgaattgatcgacagtcttcacaaactagccaaatacagatacgactgtggcaactacacagtatctacatcctacctgtacttctgtatgctggtattacctcccaatgacaggaactatcttagtgccttgtggggaaaattcgcttcagaaattctgtaccaaaactgggattcagccctggaagatctcaacaaactgagggaatatattgattccagtcccaatcagttttctggcaacagtttgcagcttctccaacagaggacttggttgatccattggtctctctttgtgtttttcaatcatgttatgggcagagaattgattattgaaatgttcttgtatagaccacactacctcaacgccatccagaccatgtgtcctcatatcttgaggtatttggctacagctgtaattattaatcgtggaaggagatcagcactgaaggacttagttaaagttattcagcaagaaagctacacttacagagatcccattacagagtttgtggaacacctttacgtcaacttcgatttcgatggagcccgtcaaaaattacacgaatgccaaacagttttactaaacgacttcttcctaatttcctgtttagacgaattcgtagaaaacgccagacttatgatcttcgagacattctgcagaattcatcaatgcatcagtataggcatgttagccgaaaagctcaacatgaatccagacgaagctgaatgctggatcgtgaatttgatcagaaacgcacgattggatgctaagatcgattctaagttagggcatgtggttatgggtgctcaacctttatcgccataccagcaacttattgaaaaaattgattccctttcggtcaggtcagaaactctgtgtgctcttatagatagaaagctcagagcgaggactgacgtaagtttctaaaggtacgttaacgaaatgatgcaagaatttgtcatttttgttacagatacgttggggaaatccagatttttaaatatctgttattttgtaataattttattggatacaaataaaagatctttccagtatgtcaaaaaaaaaaaaaaaaaa

SEQ ID NO: 129 - DNA, 619 bp, Diabrotica virgifera
  misc_feature (1)..(619): RNAi target sequence
tcacattccagttgtttagagcacttagtagagatatacacctttaagcatgtcgtgttcagcgatatatattttagatgtaaaaggaaaagtcttaatctctaggaactatagaggcgatatagacctaggtgtaatagagaagtttatgcctttattaatggaaaaagaagaagaagggcttctaactccaattttgcaaatccctgaatgcaccttctcatatattaaaaccaacaatctatatatagtaagcactacgaagaaaaatggtaatatcgctcttgtatttgtatttttacataaaatcgttcaagtaatgactgaatattttaaagaattagaagaagaaagtatcagagataattttgtcgttatttatgagttgttggacgaacttttagactttggctatcctcaaacaactgatagcaaaattcttcaagaatacatcactcaagaaggtcataaactagagatacaaccaagaattcctgtagctgtgacaaatgcagtttcatggcgttctgagggaatcaaatacaggaaaaatgaagtattcttagatgtaatcgagtcagtaaatcttttagcaagtgcaaatggcaatgtactaaga

SEQ ID NO: 130 - DNA, 20 bp, Artificial Sequence
  primer
  misc_feature (1)..(20): forward primer
tcacattccagttgtttaga

SEQ ID NO: 131 - DNA, 20 bp, Artificial Sequence
  primer
  misc_feature (1)..(20): reverse primer
tcttagtacattgccatttg

SEQ ID NO: 132 - DNA, 2131 bp, Diabrotica virgifera
  misc_feature (1)..(2131): WCRW transcript ta08478.001_diavv
agtaaataataatgattataatatggtttgcaaatagttaaatgcagtatgtgattttctgaagaagtgaagaggttatatcacattccagttgtttagagcacttagtagagatatacacctttaaacatgtcgtgttcagcgatatatattttagatgtaaaaggaaaagtcttaatctctaggaactatagaggcgatatagacctaggtgtaatagagaagtttatgcctttattaatggaaaaagaagaagaagggcttctaactccaattttgcaaatccctgaatgcaccttctcatatattaaaaccaacaatctatatatagtaagcactacgaagaaaaatggtaatatcgctcttgtatttgtatttttacataaaatcgttcaagtaatgactgaatattttaaagaattagaagaagaaagtatcagagataattttgtcgttatttatgagttgttggacgaacttttagactttggctatcctcaaacaactgatagcaaaattcttcaagaatacatcactcaagaaggtcataaactagagatacaaccaagaattcctgtagctgtgacaaatgcagtttcatggcgttctgagggaatcaaatacaggaaaaatgaagtattcttagatgtaatcgagtcagtaaatcttttagcaagtgcaaatggcaatgtactaagaagcgaaatagtgggagcaataaaaatgagagtgtatctttctggtatgcctgaactgagattaggtctcaatgataaagtattattcgagagtacaggacgtggtaaatctaaatcggtagagttagatgatgttaagttccatcaatgtgtaagattatcaagattcgagatagatagaacaatctcttttattccaccagatggtgaatttgaattaatgtcttatcgtttaaatacccatgtgaaaccattaatatggattgaatctgttatagaaagacatgcgcatagtagagtggagtacatgattaaagctaaatcgcaattcaagagacgttctactgctaacaatgttgaaataatcattccagtgccacatgatgcagactctccgaagtttaaaaccaccatcggcagtgtcaagtatgcccctgaacaaaatgccataacttggagtatcaaatcattcccagggggtaaagagtatttgatgagagcccactttggtttacctagtgttgaatgtgaagatactgagggtaaaccacctattcaggtcaaatttgaaattccatattttacaacttctggaatacaagtcagatacttgaagattatagagaaaagtgggtatcaagctctaccatgggtgagatatattacacagaatggtgactaccagttgcgtactaattaagcgttgttattgtacttttctgctttttaagttagaatataatatatttttacttatactttatttgtagggtcttataaaactttgtactatgtagcactatattcagttaatatattttaaaataaacattactttttcatgtactgttctcacaattcattataacttgtttcagcattatctatttcaaaatatttaaagtatgtacttaaacatttgacattgaataaatttacctattttattcttaaattttgggtgctttgagacaagctcagcggttggacaactgagtaagcggtagcgtttagacaacacaatgacaagccactgttaaatttactaagcgtattttctttctgctgtgtaactcagtggttgcttgggtacagtacgcaataatgagtttaaatttttttaaacttttcataaaatattcaattgacccaaaaaatggatttacagtggaataagagaagtacattttggtactgtacgagaatatttatttctagaagtattatgtaaatattatgcaaatatgtttattactactggatctaagccgtttttgtagttaatgtcagccactgaggtcgtctgaatgtacccattggttatcctgtcttttatcaagttgccatgccttcaagcgtcggaaaagttttgattttaagagagtaggcgcaaaatttaactggattcatttttttcgaatcctgagaaaact

SEQ ID NO: 133 - DNA, 660 bp, Diabrotica virgifera
  misc_feature (1)..(660): RNAi target sequence
acctccaaaagaccatcaagaaacaatccctgcaactcaccgaaatccaggctcactatgacgaaatccaacgtcaattgcaagttactcttgaccaactcagcgtatcacaaagaagggtacaggcacttaccgccgaatctgaagaaatcaggagcaattatgaaggtgctcttcgtggtaagaggcaagccgagcaaatgtacgaagaagctggcactcgcatcaacgagctcaccaccatcaacgtcaacctttcttcaatgaaggtcaagattgaacaagaactgtcctcagttcttgctgactacgatgaaatcaccaaggaactccgcatttctgatgaacgctaccaacgtgtacaggccgaactcaaacataccgtcgaaatcctacatgaagagcaagagcgcgtggtcaagatcgaagctatcaagaagagtctggaaatcgaagtcaagaacctctcagtccgtttggaagaagtcgaagccaacgctatcgttggaggaaaacgtatcatcagcaaactcgaagctcgtatcagggattgcgaagctgaactcgatgaagaaaagagacgccacgccgaaaccatcaagatcttgcgcaagaaggaacgcactgttaaggaagtcatgatccaatgtgaagaggacc

SEQ ID NO: 134 - DNA, 22 bp, Artificial Sequence
  primer
  misc_feature (1)..(22): forward primer
acctccaaaagaccatcaagaa

SEQ ID NO: 135 - DNA, 21 bp, Artificial Sequence
  primer
  misc_feature (1)..(21): reverse primer
gtcctcttcacattggatcat

SEQ ID NO: 136 - DNA, 3369 bp, Diabrotica virgifera
  misc_feature (1)..(3369): WCRW transcript ta00254.002_diavv
aatcaagtatattcaaatgggaaacaagccacaatttcacctaaaaacgactttatcgacgtctcgacgctcatatacgaacgactctgccaccactgtcaggcggcgcaggcacgcggatttcaatcttgaaattttcgacggtcagtgcaccaacgacacgactatacattcacaaaaaagcaaaaaaatctcttgaagatggcttcttcctctgtggcgaggacctccaaatactcttaccgttccacaggagctgcaggaggcagtgctgacgtcagcatcgaatacagcgcggatctgacagcgctttctaggcttgaggataaaattcgcctacttcaggatgacctagaaattgaacgagaacttagatctagaatcgaaagagaaaaagccgaccttagtgtacaagtaatccaattatcagaacgtctagaagaagctgagggtggtgcagaaagtcagtttgaaattaacaaaaaacgtgacacagaattgctgaagcttcgcaaactattagaagatgtacacatagagtcagaagaaactgctctcatcctcaagaagaaacatcaagaaatcgttgtcgacttccaagaacagattgattccttagctaaagcaaaatcaagagccgaaaaagaaaagggcaaattccaagccgaaatctaccagctcatcgcccaggtcgaaagcgtaaccaaagaacgcttgatttccatcaaacaatgtgagaaactagaaatcaccgtcaacgagctcaacatcagaatcgaggagcttaaccgttccgtcgttgacatcacctcccacaagacccgtctctcccaagagaacatcgagctcatcaaggaagtccaagacctcaaggtcaatatcgaaaacgccatctacctcaagagccagctcgccggccaactagaggatgcccgccgccgtgctgaagacgatgaaagaagacgctcccttttggaggccaacctccaccaggtcgagatcgaacttgaatctgtccgtgtgcaacttgaggaagaaagcgaagctcgtcttgaccttgaacgtcaattggtcaaatcccaaggtgaggttcaagtctacaaatccaaatatgaaaccgaagtcgttgctcgtgctgaagaagttgaagaaatccgtcgcaaattcaccatcagaatccaagaacaagaagaacacattgaagccctcttggtcaaggtcaacaacctcgagaagcaaaagtcccgcctccaatccgaagtcgaggttcttatcattgacttggagaaagcaaataacaccgctagagaacttcaaaaacgcgttgaacaactcgagagaatcaatattgacttgaagacccgtctcgatgaaacagttcaattgtacgagcaaagccaacgtgacctccgtaacaaggttactgaattgcaacgcgctgtacacgaattggacaaaactcgcgaactgaaggaccaacttgccagagaaaacaagaaattatgcgacgatctcagcgactccaagattaccattaccgagcttactcgtcgtctccatgaactcgacttggaagttcgccgtttggaaaatgaacgtgatgaacttactgcagcctacaaagaagctgaagccggacgtaaagctgaagaacaacgtgcccaacgccttgccgccgaacttggtcaattccgtcacgaagccgaaaaacgtcttcaagaaaaagacgaagaaattgaagctatccgcaaggcaaccagcatcgaaattgaacagctcaatgcccgcgtcgttgaagccgaaaccaggctcaagactgaggtcacccgcatcaagaagaagttgcagatccaaatcaccgagctcgagatgtccttggactccgccaacaaactcaacatcgacctccaaaagaccatcaagaaacaatccctgcaactcaccgaaatccaggctcactatgacgaaatccaacgtcaattgcaagttactcttgaccaactcagcgtatcacaaagaagagtacaggcacttaccgccgaatctgaagaaatcaggagcaattatgaaggtgctcttcgtggtaagaggcaagccgagcaaatgtacgaagaagctggcactcgcatcaacgagctcaccaccatcaacgtcaacctttcttcaatgaaggtcaagattgaacaagaactgtcctcagttcttgctgactacgatgaaatcaccaaggaactccgcatttctgatgaacgctaccaacgtgtacaggccgaactcaaacataccgtcgaaatcctacatgaagagcaagagcgcgtggtcaagatcgaagctatcaagaagagtctggaaatcgaagtcaagaacctctcagtccgtttggaagaagtcgaagccaacgctatcgttggaggaaaacgtatcatcagcaaactcgaagctcgtatcagggattgcgaagctgaactcgatgaagaaaagagacgtcacgccgaaaccatcaagatcttgcgcaagaaggaacgcactgttaaggaagtcatgatccaatgtgaagaggaccaaaagaacatcgctctattgcaagaaactttagacaaggctaattcgaagattactattttcaagagacaactacaagaagtcgagggtgtatctagccaaagcataactcgcgtacgtcgattccagagggaattggaagccgccgaagaccgtgccgaaaccgccgaaagcaatctgtccctcatccgcgccaaacaccgcactttcgtcaccaccagcacagtacctggctcccaagtctacttggtacaagaacaacgagcatcttccgaaatctaatcatctcctattctagctactaataaactaccccatccggccgaataacaacgtcaaagacatttatccatacagcagcgacatctgcgaaggaaaacttgagttggaagactcgtttcccttcgtcagtttcttgctgtgtgtaaacttgtctttgggctcgcgacatggtggaagacatcatcatacaagatcatttttttttgttcttcgtgcacataattaaataatatttaccactctctttgaaatattattattattattataacgaaacgtacatatttcattaaataaattaataaaatgagtaagcgatttatatttgtttgcaatcgcacgatgagtccatggtatggaaatttgtaggtttctaataaactgttatgttatgtaattgtacttatatcactgatgtgtgcttctattagaggtacaagggttattggaatgtaatttataagtttttgaatgtaccgtgtaagaataaattgcttataaataaaaaaaaaaaaaaaaaatcgg

SEQ ID NO: 137 - DNA, 589 bp, Diabrotica virgifera
  misc_feature (1)..(589): RNAi target sequence
cgatttatcagcttcccaattctctcctgatggaagagtatttcaagttgaatatgcaatgaaagcagttgaaaatagtggcaccgtaataggcctccgaggtacagatggcattgtattggctgctgaaaagctcattatgtcaaaattgcatgaaccaagtacaaataaacgaattttcaacattgataaacacataggaatggcattttcaggcttaatagctgatgcaaggcaaatcgttgagattgctagaaaagaagcatcaaattatagacatcaatatggttcaaatattcctcttaaatacctaaatgatagagtaagcatgtacatgcatgcatacactttatacagtgctgttagaccatttggttgcagtgtcatcttggccagttatgaagatagtgacccatctatgtatctgattgatccatctggagttagctatggatactttggatgtgctacaggtaaagcaaaacagtctgcaaagactgaaatagaaaaattgaagatggggaatctaacatgcaaagaacttgttaaagaagcagccaaaatcatttatttggtccatgatgagctg

SEQ ID NO: 138 - DNA, 22 bp, Artificial Sequence
  primer
  misc_feature (1)..(22): forward primer
cgatttatcagcttcccaattc

SEQ ID NO: 139 - DNA, 22 bp, Artificial Sequence
  primer
  misc_feature (1)..(22): reverse primer
cagctcatcatggaccaaataa

SEQ ID NO: 140 - DNA, 956 bp, Diabrotica virgifera
  misc_feature (1)..(956): WCRW transcript ta06609.001_diavv
aaaaaatcaaaatgagttctattggaactgggtacgatttatcagcttcccaattctctcctgatggaagagtatttcaagttgaatatgcaatgaaagcagttgaaaatagtggcaccgtaataggcctccgaggtacagatggcattgtattggctgctgaaaagctcattatgtcaaaattgcatgaaccaagtacaaataaacgaattttcaacattgataaacacataggaatggcattttcaggcttaatagctgatgcaaggcaaatcgttgagattgctagaaaagaagcatcaaattatagacatcaatatggttcaaatattcctcttaaatacctaaatgatagagtaagcatgtacatgcatgcatacactttatacagtgctgttagaccatttggttgcagtgtcatcttggccagttatgaagatagtgacccatctatgtatctgattgatccatctggagttagctatggatactttggatgtgctacaggtaaagcaaaacagtctgcaaagactgaaatagaaaaattgaagatggggaatctaacatgcaaagaacttgttaaagaagcagccaaaatcatttatttggtccatgatgagctgaaggataagaattttgaactggaactttcatgggtatgcaaagatacgaatggtttacataccaaagtgcctgaatcagtgtttgctgatgcagaaaaagctgccaaacaagcaatggaagcagattcagaatcagatacagaagatatgtaataactacatttagtttttaatatttcgctgatggtggctgttcttacaatatttcgtgtgttatgttcatatattatgtaatactgtgagaatttccatttcaaggataggtttataacttttttttctaataaatacataactttatgtcaaaaaaaaaaaaaaaaaaaaaaaaaaaaa

SEQ ID NO: 141 - DNA, 577 bp, Diabrotica virgifera
  misc_feature (1)..(577): RNAi target sequence
aattggtgcagatacacgtttgagtactggattttccatttataccagagaacaaaacaaacttttcccactatcaggcactactgttttgggttgtgcaggatgttggtgtgacactctaacattaaccagaatccttaaatctcgcatgcagatgtaccaacaagagcataacaaaacaatgtctacaactgcatgtgcccagatgttgtcaaccatgctctactacaagagattctttccttattatatatcaaacattctagtaggtttagataatgaaggaaagggctgtgtttacagctatgatcctattggacattgtgaaaaagctacgtatagagcaggtggttcagctggagctcttcttcagcctctgttggacaatcaaattggacagaagaacatgcttaaaacatctggggaacctcttagtcaggagaaagctctgtctacccttaaagatgtatttatttctgctgctgaaagagacatctacactggagatagcgtacttataaatattattactaaagatggagtaaaggaagagtccttccagttgagacgggattag

SEQ ID NO: 142 - DNA, 22 bp, Artificial Sequence
  primer
  misc_feature (1)..(22): forward primer
aattggtgcagatacacgtttg

SEQ ID NO: 143 - DNA, 22 bp, Artificial Sequence
  primer
  misc_feature (1)..(22): reverse primer
ctaatcccgtctcaactggaag

SEQ ID NO: 144 - DNA, 913 bp, Diabrotica virgifera
  misc_feature (1)..(913): WCRW transcript ta03835.001_diavv
gggggcagttatttcgacttttcatgcttgtcataaaataaaattaaaatatatccggcgaggtgttgactagcggatttttttagattcaacaatcttattttataaaataattagttaaaatgatgcaaacagctaataatgcatattatcccgattattccactgctccaatgcaacgtcaaattaacccctatgcagataatggagggagtgtagtagcaatagcaggtgaagactttgtaataattggtgcagatacacgtttgagtactggattttccatttataccagagaacaaaacaaacttttcccactatcaggcactactgttttgggttgtgcaggatgttggtgtgacactctaacattaaccagaatccttaaatctcgcatgcagatgtaccaacaagagcataacaaaacaatgtctacaactgcatgtgcccagatgttgtcaaccatgctctactacaagagattctttccttattatatatcaaacattctagtaggtttagataatgaaggaaagggctgtgtttacagctatgatcctattggacattgtgaaaaagctacgtatagagcaggtggttcagctggagctcttcttcagcctctgttggacaatcaaattggacagaagaacatgcttaaaacatctggggaacctcttagtcaggagaaagctttgtctacccttaaagatgtatttatttctgctgctgaaagagacatctacactggagatagcgtacttataaatattattactaaagatggagtaaaggaagagtccttccagttgagacgggattagaagcaagtggttttgtttatattttcttatgtgaaattcaaatatactttctaaataaacaaaaaaaaaaaaaaaaaaaaaaaaaaaaa

SEQ ID NO: 145 - DNA, 542 bp, Diabrotica virgifera
  misc_feature (1)..(542): RNAi target sequence
tcttcgttcaataccagcttcagtgatgatccccagtctgactacacctcctgaagaaccatctcttgacatggcaagtgccaatgtatttgtgacaaacttcacacattcttccttgctcatattgggcttgaagttggcatctacgtaaccataaacataactggaacctgatcctccgattgacacttcttgtctaacacacatcccaccaattggtatggaatatacttgtccgcctttctttttatcccaacctgctaccagtataccagccattagcgaatctctataattgtagcaaagttcttggaaaatggcggcacctacttgtactttgggttcttcaccaagttccataccatgaaaattaagatgataagcaacaatgtctgcaattgcttgtgtatctgctgcagatcctgaacgacaacagtatatatggtcagtgactttggtgagtttgtctgctacccggtttgcaatgtaggccccagtagttgtgcgagaatctgctcctataacaacgcctccatcaaact

SEQ ID NO: 146 - DNA, 22 bp, Artificial Sequence
  primer
  misc_feature (1)..(22): forward primer
tcttcgttcaataccagcttca

SEQ ID NO: 147 - DNA, 22 bp, Artificial Sequence
  primer
  misc_feature (1)..(22): reverse primer
agtttgatggaggcgttgttat

SEQ ID NO: 148 - DNA, 850 bp, Diabrotica virgifera
  misc_feature (1)..(850): WCRW transcript ta02145.001_diavv
attgcagggggactggcaaaatattgcattgtaggattacaagtgtaatttttctaagcttgtattcttttcattaaacttgtaaaaaatgcctcttatgactgagtatggtgcaatgactggtcctaatgattggagagatgccgctcacagtacaggaacctctattatggccgcggagtttgatggaggcgttgttataggagcagattctcgcacaactactggggcttacattgcaaaccgggtagcagacaaactcaccaaagtcactgaccatatatactgttgtcgttcaggatctgcagcagatacacaagcaattgcagacattgttgcttatcatcttaattttcatggtatggaacttggtgaagaacccaaagtacaagtaggtgccgccattttccaagaactttgctacaattatagagattcgctaatggctggtatactggtagcaggttgggataaaaagaaaggcggacaagtatattccataccaattggtgggatgtgtgttagacaagaagtgtcaatcggaggatcaggttccagttatgtttatggttacgtagatgccaacttcaagcccaatatgagcaaggaagaatgtgtgaagtttgtcacaaatacattggcacttgccatgtcaagagatggttcttcaggaggtgtagtcagactggggatcatcactgaagctggtattgaacgaagagttgttttaggaaatgaattgcccaaattttatgaaggttaattgattattttttaagctttggtatgttttggtatatattaaaataaaaaaatcagttttacactaaaaaaaaaaaaaaaaaatcgg

SEQ ID NO: 149 - DNA, 559 bp, Diabrotica virgifera
  misc_feature (1)..(559): RNAi target sequence
ctgaattgaccaacaaattggattcaattagagggtttttacattctcgtttacgtaccgctacactcaggaacgactttgaaggtcaagctgtgtttataaattgcctgttgagaaattatttgcattattcgttgtatgatcaagctgacaaactagtgagtaaatgcgtatttcctgaaactgcaagtaacaatgaatgggccagattcttatactacttgggcagaattaaggcggcaagattagaatacagtgtagcacataaacatcttgtgcaggccatgagaaaagcaccccagaatgctgccattggtttcagacaggttgttcaaaagcttactgttgtagttgaactactgctaggagatataccagaacgacagatttttagacaatctagtatgaggcactcccttgccccatactttcaactaacacaagcagttagaatgggcaatttgcaaagatttggtgaggtgttagagaacttcggcccacaatttagacaagatcatacatttacactaattttgagactgcgccacaatgttattaa

SEQ ID NO: 150 - DNA, 22 bp, Artificial Sequence
  primer
  misc_feature (1)..(22): forward primer
ctgaattgaccaacaaattgga

SEQ ID NO: 151 - DNA, 22 bp, Artificial Sequence
  primer
  misc_feature (1)..(22): reverse primer
ttaataacattgtggcgcagtc

SEQ ID NO: 152 - DNA, 1711 bp, Diabrotica virgifera
  misc_feature (1)..(1711): WCRW transcript ta08208.001_diavv
ggggggaggggattgtcaaatagttgtcagcgttacacagcgaatattttcctcatcagttcaatattaacaataaattgttttgttgaaattgaaatcacaaattactttataaaatggtaactctagaagacgttgaaatgaaaaatgcagacagtcctccaggattagaagctggtgatacaaagaaagataccgacctacaaagtgtaatagaaattcgtgaacatgcaagacaaatagaaaaatcagtcacaagtaaagaaaaccgtttcatcttacgagttttacgttgcttgcccaacactagaaggaagcttaatggactggtgctgagaagcctcattactcaaatatatcctgtagctgaacgtgatgccctccttagtttcgtcgaggaagcttctggagaactcgacgccacccagtcacgagcaagatcagctgttaagtcacctgttcccgaggtagatacatatataaatcttttaatactagtacgtttaattgataccaataagttagttgaagcagagcgctgttctcaagctcttatgaataaaataactaaccaaaacagacgtactatagatcatattgctgccaagtgttatttctatcactcaagagttgctgaattgaccaacaaattggattcaattagagggtttttacattctcgtctacgtaccgctacactcaggaacgactttgaaggtcaagctgtgcttataaattgcctgttgagaaattatttgcattattcgttgtatgatcaagctgacaaactagtgagtaaatgcgtatttcctgaaactgcaagtaacaatgaatgggccagattcttatactacttgggcagaattaaggcggcaagattagaatacagtgtagcacataaacatcttgtgcaggccatgagaaaagcaccccagaatgctgccattggtttcagacaggttgttcaaaagcttactgttgtagttgaactactgctaggagatataccagaacgacagatttttagacaatctagtatgaggcactcccttgccccatactttcaactaacacaagcagttagaatgggcaatttgcaaagatttggtgaggtgttagagaacttcggcccacaatttagacaagatcatacatttacactaattttgagactgcgccacaatgttattaaaacagctataagatccataggattatcatactccagaatatctccccaagacatagctaagaaactggggctggattcagctgaagatgcagaatttatagtagcaaaagcaatcagagatggggtgatagaagctacacttgatccacagggaggttacatgaggagcaaagaaagtactgacatctactgcacaaaggaacctcaactggcgtttcatcaaagaatatcgttttgcttagatttgcacaatcaaagtgtcaaagctatgagatatccccccaaggcgtatggcaaagaacttgaatcagcagaagagagaagggaaagagaacagcaggatttggagttggccaaggaaatggctgaagaagatgatgatggttttccttaagttggtgtagttatcaatattaattttataacatttttgcttttgtatggtatttatagacagtagatttatcaaaatatactgagtaaaactccaaaaaaaaaaaaaaaaaaaaaaaaaaaaaa

SEQ ID NO: 153 - DNA, 473 bp, Diabrotica virgifera
  misc_feature (1)..(473): RNAi target sequence
atgtgtgatgactggcatgattgctgacagcaagtcccaggtgcagagagctagatatgaggctgccgagttcaaatataagtttggatatgagatgccaatcgatgccttgtgtaggagagtatcggatatttcccaggtttatacgcagaatgctgagatgagacctttgggttgctccatgcttctgataggatatgaccaagaaatgggaccatgtgtccacaaagctgaccctgctggctattactgtggctacagagcagtaagtgtaggatccaaacaaactgaagccaacagctacctagagaagaagctaaagaagaaaactgatctgtccaaagatgaagtcatccaattggcaatcagttgtctttcaagtgttttatctgtagattttaaaccaacagaagtcgaagttggggttgttactaaggatgagcccaagtttaggaaattgacggaacaagaaa

SEQ ID NO: 154 - DNA, 22 bp, Artificial Sequence
  primer
  misc_feature (1)..(22): forward primer
atgtgtgatgactggcatgatt

SEQ ID NO: 155 - DNA, 22 bp, Artificial Sequence
  primer
  misc_feature (1)..(22): reverse primer
tttcttgttccgtcaatttcct

SEQ ID NO: 156 - DNA, 879 bp, Diabrotica virgifera
  misc_feature (1)..(879): WCRW transcript 454run3_isotig15710
gtgacaacagaaaaatatagaaaatcatcctctgtgtttccgttttgaacttaacttgtatttagtttaaaaaataatcatgtctagaggaagcagtgcaggttttgaccgacacataacaattttctcgcccgaaggccgactctatcaagtagagtatgcttttaaagccattaaccaagccggccccacttcggtagcagtccgaggagtagatgctgcggcgtgtgtgacccagagaaagatcccggataagctgattgatcccaacacaattacacatctgttccagttaacagaacacactggatgtgtgatgactggcatgattgctgacagcaagtcccaggtgcagagagctagatatgaggctgccgagttcaaatataagtttggatatgagatgccaatcgatgccttgtgtaggagagtatcggatatttcccaggtttatacgcagaatgctgagatgagacctttgggttgctccatgcttctgataggatatgaccaagaaatgggaccatgtgtctacaaagctgaccctgctggctattactgtggctacagagcagtaagtgtaggatccaaacaaactgaagccaacagctacctagagaagaagctaaagaagaaaactgatctgtccaaagatgaagtcatccaattggcaatcagttgtctttcaagtgttttatctgtagattttaaaccaacagaagtcgaagttggggttgttactaaggatgagcccaagtttaggaaattgacggaacaagaaatagatttccatctgacagctattgctgagagggattagatagattttttatattcactctttgtaatgttaagaaatggtcaaattttgagttaagt

SEQ ID NO: 157 - DNA, 451 bp, Diabrotica virgifera
  misc_feature (1)..(451): RNAi target sequence
agataggcggtttggtattcaagcccaaacggtagctacaaatttccaaaaaaatctttgaaatgggaccacatttatatgtgggtcttccaggattagccacagatacccaaacagttatggaaaaactccgtttccgaaaaaacttgtacgaacttaaggaaaatcgaaaaatatctccaaaagtatttgcctctatgatatcaaatatgttgtatgaaaaaagatttgggccattttttgtagaacctgtagtagctggacttctacctaatacttatgaaccctttatctgtaatatggatttaattggttgtataaaccaaccttcagactttgttgttggtggaacagcgtcagcacagttgtatggtatgtgtgaagcactttgggagcctaacctaggacctgaggatctttttgaaaccatctctcaagctctcatcaatgc

SEQ ID NO: 158 - DNA, 22 bp, Artificial Sequence
  primer
  misc_feature (1)..(22): forward primer
agataggcggtttggtattcaa

SEQ ID NO: 159 - DNA, 22 bp, Artificial Sequence
  primer
  misc_feature (1)..(22): reverse primer
gcattgatgagagcttgagaga

SEQ ID NO: 160 - DNA, 829 bp, Diabrotica virgifera
  misc_feature (1)..(829): WCRW transcript ta03399.001_diavv
gtttgcagagagtgtattagtgtattgtattttagtattttacaattctttgaattgcagattatttagcggtttagtacaaaaacctgaagtaaattctataacggaaagtgcttaaattttagtggtaaaatgtccattctagcttacaatggtggtgctatggtggcgatgaagggagaaaactgtgtagcaattgcagcagataggcggtttggtattcaagcccaaacagtagctacaaatttccaaaaaatctttgaaatgggaccacatttatatgtgggtcttccaggattagccacagatacccaaacagttatggaaaaactccgtttccgaaaaaacttgtacgaacttaaggaaaatcgaaaaatatctccaaaagtatttgcctctatgatatcaaatatgttgtatgaaaaaagatttgggccattttttgtagaacctgtagtagctggacttctacctaatacttatgaaccctttatctgtaatatggatttaattggttgtataaaccaaccttcagactttgttgttggtggaacagcgtcagcacagttgtatggtatgtgtgaagcactttgggagcctaacctaggacctgaggatctttttgaaaccatctctcaagctctcatcaatgcctttgacagagatgccatttctggttggggagctacagtgtacatcatagaaaaaaataaggtgactgtaaaaaatttgaagacacgtatggactagttaaatcttgttttttcatttacatttaattgataaaataaatgaaactatttgataaaaaaaaaaaaaaaaaatgcga

SEQ ID NO: 161 - DNA, 530 bp, Diabrotica virgifera
  misc_feature (1)..(530): RNAi target sequence
cttcttcgactaggaggtggaatgccaggtttaactcaggcaccgccgccttctgatgctcctgttgtggatactgccgaacaagtatacatatcctccttagcactattaaaaatgttgaagcacggccgagctggagtacccatggaagtaatgggtcttatgttaggagaattcgtagatgactataccgttcgtgtaatcgatgtatttgctatgcctcagactggtaccggtgtcagtgtagaagctgctgatccagtgtttcaaacaaaaatgcttgacgtgttaagacagactggtaggccagaaatggttgtggggtggtatcattcccatccaggtttcggatgttggttgtctggagtggatatcaacacccagcaaagttttgaggctctcacggaaagagctgtagcagtagtagttgatccaatccagtcagtgaaaggcaaagtcgttattgatgcctttaggttaataaatccgaatatgatggtattgggccaagaacctcgccaaactacatc

SEQ ID NO: 162 - DNA, 22 bp, Artificial Sequence
  primer
  misc_feature (1)..(22): forward primer
cttcttcgactaggaggtggaa

SEQ ID NO: 163 - DNA, 22 bp, Artificial Sequence
  primer
  misc_feature (1)..(22): reverse primer
gatgtagtttggcgaggttctt

SEQ ID NO: 164 - DNA, 1190 bp, Artificial Sequence
  primer
  misc_feature (1)..(1190): WCRW transcript ta04924.001_diavv
tgacagatgacttgtaagggggaaaactaaaagtcatactcacggttgtttttgtaaaacttgtaggtaacgaattttcgtttttagtgaattaacaaaacaacagagtgattttccaacaagaataacttatttattagtttcattaatttgataaacaataaaatggatagacttcttcgactaggaggtggaatgccaggtttaactcaggcaccgccgccttctgatgctcctgttgtggatactgccgaacaagtatacatatcctccttagcactattaaaaatgttgaagcacggccgagctggagtacccatggaagtaatgggtcttatgttaggagaattcgtagatgactataccgttcgtgtaatcgatgtatttgctatgcctcagactggtaccggtgtcagtgtagaagctgttgatccagtgtttcaagcaaaaatgcttgacatgttaagacagactggtaggccagaaatggttgtggggtggtatcattcccatccaggtttcggatgttggttgtctggagtggatatcaacacccagcaaagttttgaggctctctcggaaagagctgtagcagtagtagttgatccaatccagtcagtgaaaggcaaagtcgttattgatgcctttaggttaataaatccgaatatgatggtattgggccaagaacctcgccaaactacatccaacttaggacatctacagaaaccatcagtccaggctttgattcatggtctaaatcggcattactactccatcagtattaattacagaaagaatgaattggaacaaaaaatgctactaaatctccataaaaaatcctggatggatggtctaactttagcagattactctgaaaattgtagtgtgaatgaaaagactgtagctgatatgttagaactagccaagaattacaacaaggcattagaagaggaggagaaaatgactccagaacagctcgctattaaaaatgttggcaaacaagatcctaagaggcatttagaagaaaaggttgatattttgatgaccaataatatcgtccagtgcttgggagctatgctagatacagttgtttttaagtaattgctggatctctttttttactataattgcaacttatttataagatattttttcaataaaaacttttattatgaatttgtgttgcgcag

SEQ ID NO: 165 - DNA, 654 bp, Diabrotica virgifera
  misc_feature (1)..(654): RNAi target sequence
acgatttttgaggttgtcggctagaagttcgcaaagtaaatctaaattccaacaattaaaccgaaatagttctttaaaaaagatgtttcgaaaccaatacgatagtgatgtgacagtgtggagcccccagggccgtctgcatcaggtagaatatgccatggaagcagttaacctaggttcagccacagtgggactgaaaagtaaaactcatgctgtacttatcgctttgaagagggcttcttcagaactgtctgcctaccagaagaaaattatcaacatagacgatcacattggtatcaccatctcgggacttacagctgatgctaggatccttagtagatatatgcgaaacgaatgcttgaattataagtactctttggatacttatatgccattgaataggcttatcagtattttaggtaacaaaatgcagacatgtacccaaagatacgaccgcagaccatttggtgtaggtcttctagtagctggttatgacgaatctggttctcatatctaccaaacgtgcccttctgctaatttctacgattgcaaagctatgtccattggagctcgatcccagagtgccaggacatacttagaaaaacatctggatgaattgccatctagttctttagaagaacttatcaaacatgg

SEQ ID NO: 166 - DNA, 22 bp, Artificial Sequence
  primer
  misc_feature (1)..(22): forward primer
atttttgaggttgtcggctaga

SEQ ID NO: 167 - DNA, 22 bp, Artificial Sequence
  primer
  misc_feature (1)..(22): reverse primer
ccatgtttgataagttcttcta

SEQ ID NO: 168 - DNA, 1142 bp, Diabrotica virgifera
  misc_feature (1)..(1142): WCRW transcript ta04466.001_diavv
gggggagggggacagtcgacgtagcattacaaacgatttttgaggttgtcggctagaagttcgcaaagtaaatctaaattccaacaattaaaccgaaatagttctttaaaaaagatgtttcgaaaccaatacgatagtgatgtgacagtgtggagcccccagggccgtctgcatcaggtagaatatgccatggaagcagttaacctaggttcagccacagtgggactgaaaagtaaaactcatgctgtacttatcgctttgaagagggcttcttcagaactgtctgcctaccagaagaaaattatcaacatagacgatcacattggtatcaccatctcgggacttacagctgatgctaggatccttagtagatatatgcgaaacgaatgcttgaattataagtactctttggatacttatatgccattgaataggcttatcagtattttaggtaacaaaatgcagacatgtacccaaagatacgaccgcagaccatttggtgtaggtcttctagtagctggttatgacgaatctggttctcatatctaccaaacgtgcccttctgctaatttctacgattgcaaagctatgtccattggagctcgatcccagagtgccaggacatacttagaaaaacatctggatgaattgccatctagttctttagaagaacttatcaaacatggattgagggctcttagagatactctacctccagaggttgacctcacaacaaaaaatgtctccataggatacactggcaaaggtcagacctttaaaatcctcgaagaagaagaaacttccccctacttgtcccttattgagggtgaagaacgtagaggaggaggagctgcagctgctgcaattgaggaccttcctgcagatccgttgagagatgatgcgggggacgagcccagggatgcagtcccagctgtggaaacttctgccatggataccacagaatagaaggattagataaagcattaaagccacccgttgatcaggagagtgggtattggaaaggaatattgccgtggctgtctctgttagtctaaaacagactgagacagtcacggcagaacatcgtttgttatatccatactgtattttttaagcttttaataatattttgattaataaat

SEQ ID NO: 169 - DNA, 558 bp, Diabrotica virgifera
  misc_feature (1)..(558): RNAi target sequence
tctgtgcaaaaacaaactgacaagtttgacataagtgacaagtgacatagcggttgtcaacaattttgcaagttgtgtaaattgttaatttgaaggaagcttttaacttttaagtaaaattaactgaaaatggctacagttttgtgtccagaaataccaacgcctggtttttcattcgaaaattgtaaaagaaatgcacttctggaaaataagggccttgctcttccaaaagccactaaaacaggtactacgatcgtaggaatagtctacaaagatggaattattcttggagcagatactagagctacagaagacaccacagttgcagataagaactgtgaaaagattcacttccttgcacccaatatgtattgttgtggtgctggtactgcagcagatacagaaatgaccactcagatggtctctgctaaattagaactccacagattatacacaaaccgagttactagagtgtgtacagcaaaccaattgttaaaacaatatctatttcgctaccagggatatattggggctgctttaatcctgggtggtgttgat

SEQ ID NO: 170 - DNA, 22 bp, Artificial Sequence
  primer
  misc_feature (1)..(22): forward primer
tctgtgcaaaaacaaactgaca

SEQ ID NO: 171 - DNA, 22 bp, Artificial Sequence
  primer
  misc_feature (1)..(22): reverse primer
atcaacaccacccaggattaaa

SEQ ID NO: 172 - DNA, 1578 bp, Diabrotica virgifera
  misc_feature (1)..(1578): WCRW transcript ta04816.001_diavv
gggggttttaaattttcgtagacacgattgttcagtagttcaaaattcattattattaatgttctgtgcaaaaacaaactgacaagtttgacataagtgagaagggacatagcggttgtcaacaattttgcaagttgtgtaaattgttaatttgaaggaagcttttaacttttaagtaaaattaactgaaaatggctacagttttgtgtccagaaataccaacgcctggtttttcattcgaaaattgtaaaagaaatgcacttctggaaaataagggccttgctcttccaaaagccactaaaacaggtactacgatcgtaggaatagtctacaaagatggaattattcttggagcagatactagagctacagaagacaccacagttgcagacaagaactgtgaaaagattcacttccttgcacccaatatgtattgttgtggtgctggtactgcagcagatacagaaatgaccactcagatggtctctgctaaattagaactccacagattatacacaaaccgagttactagagtgtgtacagcaaaccaattgttaaaacaatatctatttcgctaccagggatatattggggctgctttaatcctgggtggtgttgatattgaaggaccacatctatatatgatttatccacatggatccagtgttgatcttccttatgctacaatgggttctggttccttagcagccatatctgtctttgaatcccgctggaagcctcaaatggaagaggaagatggtgtccaactagtaagagatgctattgcagctggtatattcaatgatctaggttcaggttccaatgtagacatctgtgtaataagaaagggttcagtagactacaaacgaacctatgacgaggctaacaaaaagggagttaaacaaggatcttatagatatcaaagaggaaccactgcagtgctcagtacccaggtggtggatgttgaggaagtctcagtgattcccattgaagctgaagaaatggatgttgcttaaatattacagttaaataaatgtcattgtattctttttggtatttactttaatataaaaataaaaaataaatataacagggtttaaatgttcaataatatagtaaattttaatttaaaaaaatattttttcttaacaattacaatagccacatctaaatagatttgctactcaaggatgttgagttaataggatcagtcagtctataaaactaaagaacacatttattttgatcattactttgggtttgatagctgccctttattatatgttaattttaagtacaatctatataaccctaaagttgtttacccaaaaatcatttttatcattttcgagagtaaatattgttcaattttcacatgtcaaaaatattattatattttttactgtgtttaatcttttattacaacccttaaggtactagtacacttcagaagaacaaaaataatcatttttttaaagaattttcctctcagaacctgtattaaaaatgaacacaaaacctgtcacatactaatatctaactctcagagagtacaagaaatatatctcttttcattca

SEQ ID NO: 173 - DNA, 473 bp, Diabrotica virgifera
  misc_feature (1)..(473): RNAi target sequence
aatataccgaaaatgccgagtcaagaattaacaactaataaagtaatagtccaccctttggttcttctaagtgtggtggaccattttaatcgcatgggcaaaatcggcaatcaaaagcgtgttgttggtgttcttcttggctgttggcgtgctaaaggagtcttagatgtttctaacagttttgcagttccttttgacgaagatgacaaggataagtctgtgtggttcttggaccatgattacttagaaaacatgtatggaatgttcaaaaaagttaatgccagggaacgagtagtaggttggtaccacaccggccccaaacttcatcaaaatgatattgccattaatgagttaatcagaaggtattgtccaaattccgttctagttatcatagacgctaaaccaaaagatttaggtttaccaactgaagcttatcaagctgtagaagaagtacacgatgacggttcacctac

SEQ ID NO: 174 - DNA, 22 bp, Artificial Sequence
  primer
  misc_feature (1)..(22): forward primer
aatataccgaaaatgccgagtc

SEQ ID NO: 175 - DNA, 22 bp, Artificial Sequence
  primer
  misc_feature (1)..(22): reverse primer
gtaggtgaaccgtcatcgtgta

SEQ ID NO: 176 - DNA, 1221 bp, Diabrotica virgifera
  misc_feature (1)..(1221): WCRW transcript ta03894.001_diavv
tagttaattgggaacaaagattttattagaataatataccgaaaatgccgagtcaagaattaacaactaataaagtaatagtccaccctttggttcttctaagtgtggtggaccattttaatcgcatgggcaaaatcggcaatcaaaagcgtgttgttggtgttcttcttggctgttggcgtgctaaaggagtcttagatgtttctaacagttttgcagttccttttgacgaagatgacaaggataagtctgtgtggttcttggaccatgattacttagaaaacatgtatggaatgttcaaaaaagttaatgccagggaacgagtagtaggttggtaccacaccggccccaaacttcatcaaaatgatattgccattaatgagttaatcagaaggtattgtccaaattccgttctagttatcatagacgctaaaccaaaagatttaggtttaccaactgaagcttatcaagctgtagaagaagtacacgatgacggttcacctacatctaaaacatttgagcatgttcctagtgaaatcggagctgaggaagctgaagaagttggtgttgaacacttattgagagatattaaagacacaactgttggtactttgtcacagagaataacgaatcagcttttagggttaaaaggtctccattcacagttacgtgatattagggactatttggtacaagtgtgtggtaaccagcttccaatcaatcaccaaatcatctaccaattacaagacatatttaatcttttgcccgatataaatcaggatgcatttaatacatcgttttacgtgaaaaataacgatcaaatgttagtcgtttatctagcagctttagttagatctattgtcgctctacacaatcttattaacaacaaactaacaaatagagacgcggaagaaggaaaaaaggaggatagtaagaaagaaagcaaagataaggacaaggataaagagaaggaaaaggataaagatgctaagaaggacgagaagaaaaagtaattgtgtattatatctggttctacattcaaatgttctcatgttgtgttttcaaacacgatattttaatggtttcaacactttccatttgattcgagtataataatttattttcattttatatgctagtttagtatatacctaacttccttactaagtttgatttatatttaggcaataaagttctttatacaaaaaaaaaaaaaaaaaa

SEQ ID NO: 177 - DNA, 553 bp, Diabrotica virgifera
  misc_feature (1)..(553): RNAi target sequence
ttaattctgctgctcctcctttgtggcataacggccccgtacctggagaattttacaattttcccggcaaacagaccagctattccaaccctataacacatacacagtctcccgttacaacatcaacttctgtattagctattacttacgataaaggagtattgatagccggagatctggttgcttcatacggatctttagctaggtacggaaattgcccgagggttattaaagtcaatcagaatatcatcttgggagccggaggagactatgctgatttccaatacgtcaagagtttcattgagcaaaaaataattgatgaagaatgcattgatgatggactaaaaatgaaaccaaaatcattgtactgctggcttactagagtaatgtaccaacgcaggagtaaattagaccctttttggaataatctggttataggaggaatccaggatggagtcccctttcttggaaccgtagataaattgggaactgcatatacagacaaagttatatgtacaggttatggagcccacatagccttgcctcttctgag

SEQ ID NO: 178 - DNA, 22 bp, Artificial Sequence
  primer
  misc_feature (1)..(22): forward primer
ttaattctgctgctcctccttt

SEQ ID NO: 179 - DNA, 22 bp, Artificial Sequence
  primer
  misc_feature (1)..(22): reverse primer
ctcagaagaggcaaggctatgt

SEQ ID NO: 180 - DNA, 925 bp, Diabrotica virgifera
  misc_feature (1)..(925): WCRW transcript ta01874.001_diavv
aaacaagtcatcgttgaattttctgaagttagagattctttgattacagtttgttgtattaaatagaaaatgtttaattctgctgctcctcctttgtggcataacggccccgtacctggagaattttacaattttcccggcaaacagaccagctattccaaccctataacacatacacagtctcccgttacaacatcaacttctgtattagctattacttacgataaaggagtattgatagccggagatctggttgcttcatacggatctttagctaggtacagaaattgcccgagggttattaaagtcaatcagaatatcatcttgggagccggaggagactatgctgatttccaatacgtcaagagtttcattgagcaaaaaataattgatgaagaatgcattgatgatggactaaaaatgaaaccaaaatcattgtactgctggcttactagagtaatgtaccaacgcaggagtaaattagaccctttttggaataatctggttataggaggaatccaggatggagtcccctttcttggaaccgtagataaattgggaactgcatatacagacaaagttatatgtacaggttatggagcccacatagccttgcctcttctgagagactctttagataaaaatggagctcttaacttggccgatgccaaaactctgattcacaaatgcatggaagtattgttctatagagatgccagaagttttcctaaatatcagcttggtgttattgataaagatgatggtgttagtattgaggggcctatttcagtcgaagagaactggagcattgcccatatgacataatttttcttaatttcgtttattttgtattgaaactatattatacattcatggaagtctgtgtgaataaatttttgataaaactaaaaaaaaaaaaaaaaaa

SEQ ID NO: 181 - DNA, 420 bp, Diabrotica virgifera
  misc_feature (1)..(420): RNAi target sequence
acaagcaatggcgaaagtaaatgaagtggctaatttgtacaagcagttaaaatcagaatggaataccaacaacccaaatttaagtaaatgtgaaaaactactctcaactcttaagcttgagctcaccaatctaatgtttctgccgattaccacatctactgcgtccaaacaagaactacttctagccagagatgttctagagataggagtccaatggagtatagcagccaatgatattacatcttttgaaagatacatggcacaattaaaatgttattacttcgattataacaaccaactaccagaatcaccatttaagtaccaactgcttggattaaacttgttattcctgctgtcacaaaaccgagtagcagaatttcacactgaattggaacttttacctgccgatcatattcagaa

SEQ ID NO: 182 - DNA, 22 bp, Artificial Sequence
  primer
  misc_feature (1)..(22): forward primer
acaagcaatggcgaaagtaaat

SEQ ID NO: 183 - DNA, 22 bp, Artificial Sequence
  primer
  misc_feature (1)..(22)
ttctgaatatgatcggcaggta

SEQ ID NO: 184 - DNA, 1040 bp, Diabrotica virgifera
  misc_feature (1)..(1040): WCRW transcript ta06150.001_diavv
gacagctgtcacaaatattcaacggattccatttgttcctagtcatagtgtaatttgtggaagaattttgttcgagtatttatagctaaaattctgaagatttaattaattaaacaagcaatggcgaaagtaaatgaagtggctaatttgtacaagcagttaaaatcagaatggaataccaacaacccaaatttaagtaaatgtgaaaaactactctcaactcttaagcttgagctcaccaatctaatgtttctgccgattaccacatctactgcgtccaaacaagaactacttctagccagagatgttctagagataggagtccaatggagtatagcagccaatgatattacatcttttgaaagatacatggcacaattaaaatgttattacttcgattataacaaccaactaccagaatcaccatttaagtaccaactgcttggattaaacttgttattcctgctgtcacaaaaccgagtagcagaatttcacactgaattggaacttttacctgccgatcatattcagaatgatgtgtacatcagacatcccttgtctattgaacaatatttaatggaagggagttataataaaatatttctggctaaaggtaatgtacctgctaagagttataacttctttatggatattttgctggacaccataagagaagaaattgcagactgtttatcagtagcctatgaaaagatctcagtaaaagacgtagccagaatgctgtacctgccaaacgaagaagctgctaaaacatttgccaaaaaggctttccagctcaaaccgtggaagctcaacaatgactttttccactttcttcctgaagagaagacccacgaacccataccctcacaggaactggcacagcaggctatagagtatgccaaggaacttgaaatgattgtctaataggtgtatttaattcttatatttaggatttttttatataaaaatcaatatttaataaacaaacaatttatttgttttgtactttaaaaaaaaaaaaaaaaaaaaaaaaaaatgcg

SEQ ID NO: 185 - DNA, 716 bp, Diabrotica virgifera
  misc_feature (1)..(716): RNAi target sequence
  misc_feature (608)..(608): n can be any nucleotide
  misc_feature (645)..(645): n can be any nucleotide
cattacatagcgctttttgttattgcaaattgtcggcccgagttattttgtacaatggagtgtctacttggtatcaaatttaatgattacgttcttgttgctgcagatatgactgcagcgcaaagcataattgtaatgaaaacagatgaaaacaagcttcataaactttccaataagcttgttatggctgtttctggtgagtctggggatactacacagtttgcagagtatatagcaaaaaatattcaactttacaaaatgaggaatacctatgaattgagtcccaaagaagctgcagcatttactagaagaaatttggcagatgcactcagaagcagaagtgcataccatgtaaaccttcttctagctggatatgatgacaaagaaggtcctcagctatattacatggactacctagcatccatagcaagcgttgattatgctgctcatggttatggaggattcttttcactgtcaattatggatcgtaattatcggcagaaccttagtaaagaagaaggttatgaacttttgaaaaaatgtgtgaaagaagttcagaaaagattgatcatcaatttgcctaactttaaggtgcagtgtgttgatanaaatggcatccaggatatgcctaatatcactgctaangatttggtttaatttagtttgatataagttatgtatttttttttattattaaataaactgaattttcttgt

SEQ ID NO: 186 - DNA, 20 bp, Artificial Sequence
  primer
  misc_feature (1)..(20): forward primer
cattacatagcgctttttgt

SEQ ID NO: 187 - DNA, 20 bp, Artificial Sequence
  primer
  misc_feature (1)..(20): reverse primer
acaagaaaattcagtttatt

SEQ ID NO: 188 - DNA, 872 bp, Diabrotica virgifera
  misc_feature (1)..(872): WCRW transcript ta01941.001_diavv
aaaaatggggggctatcattacatagcgctttttgttattgcaaattgtcggcccgagttattttgtacaatggagtgtctacttggtatcaaatttaatgactacgttcttgttgctgcagatatgactgcagcgcaaagcataattgtaatgaaaacagatgaaaacaagcttcataaactttccaataagcttgttatggctgtttctggtgagtctggggatactacacagtttgcagagtatatagcaaaaaatattcaactttacaaaatgaggaatacctatgaattgagtcccaaagaagctgcagcatttactagaagaaatttggcagatgcactcagaagcagaagtgcataccatgtaaaccttcttctagctggatatgatgacaaagaaggtcctcagctatattacatggactacctagcatccatagcaagcgttgattatgctgctcatggttatggaggattcttttcactgtcaattatggatcgtaattatcggcagaaccttagtaaagaagaaggttacgaacttttgaaaaaatgtgtgaaagaagttcagaaaagattgatcatcaatttgcctaactttaaggtgcagtgtgttgataaaaatggcatccaggatatgcctaatatcactgctaaggatttggtttaatttagtttgatataagttatgtatttttttattattaaataaactgaattttcttgtaaaaaaaaaaaaaaaagtagcatttatttctatattaggacaagaaattagatagggtggtatatgcttgtaacaaaatttactaattatacggtaaacgccaccctactagatacataggaacattgagctattacagtcc

SEQ ID NO: 189 - DNA, 364 bp, Diabrotica virgifera
  misc_feature (1)..(364): RNAi target sequence
  misc_feature (274)..(274): n can be any nucleotide
ttggcatgactgtgcaaatagtcggtccattgtgcatgagtaaagtgattctaaccataacttcaaaacgctttagttttaaatatttgtgaacattaataacagaaacagttcattcaaaataatctataagaatgggcgatacaaaggtagaacctacaaaggtggataaaacaaaggggactgaggacaaaaacaaaaatgaactgtcggaagaagacaaacagcttcaagatgaattaaatttgtgtgttgagaaactccaaggataacnatgaaaagagatacctacttgctttgcaaagctttatcaaatcatattcaaagcctcaactacttcgatgacttctgttcctaaagccgt

SEQ ID NO: 190 - DNA, 22 bp, Artificial Sequence
  primer
  misc_feature (1)..(22): forward primer
ttggcatgactgtgcaaatagt

SEQ ID NO: 191 - DNA, 22 bp, Artificial Sequence
  primer
  misc_feature (1)..(22): reverse primer
acggctttaggaacagaagtca

SEQ ID NO: 192 - DNA, 3066 bp, Diabrotica virgifera
  misc_feature (1)..(3066): WCRW transcript ta44362.001_diavv
attgaatgcttggcatgactgtgcaaatagtcggtccattgtgcatgagtaaagtgattctaaccataacttcaaaacgctttagttttaaatatttgtgaacattaataacagaaacagttcattcaaaataatctataagaatgggcgatacaaaggtagaacctacaaaggggactgaggacaaaaacaaaaatgaactgtcggaagaagacaaacagcttcaagatgaattaaatttgtgtgttgagaaactccaggataacgatgaaaagagatacctacttgctttgcaagctttatcaaatcatattcaagcctcaactacttcgatgacttctgttcctaagccgttaaaatttatgaggccccattacgaaaccatgaagacagtacatgaaaaaattactgatcctgatactaaaaaagtctgtgcagatattatatctgttttagctatgacaatgggagaaggcagagaatgtttgaaataccgtcttctttctaatttggataaaattggcgaatggggacatgaatatgttaggcatttggcaggagagattgcaggagaatgggccgagactgattttatagtgaacactgaaattagggaaaaacttatcttactaacaaaacaaattgtgccatataatatggcacacaatgcagaagcagaagcatgtgacttgcttatggaaattgaaaggcttgatctactagaacagtatgttgatgaaaacatctaccatagagtgtgcttatatctcaccagctgtgtaccctatgtggcagatcctgagaatactactctactgcagactgctcttttactgtttagaaagtttgatcagtatccccaggcactgagattagcaatgcagttaaatgactttggattaattgaagaaatttttgtcaactgcccagattcggacgtacaaaaacaactggcatttatgctaggacgacaacagatatatgttgaaattcctgagcatacgcctgaatacgaagatctaatcgagataatggcaaactgtcatcttaataaccacttcttgaacctcgctcgcgagttggacattatggatcctaaaacccccgaagacgtttacaaatcccatttagaaaatagtcgtcctccatttggtggaaaccaagttgattcagccagacaaaacttagctgccagctttgttaacggttttgttaatgctgcttttggtcaagataagctcttaatggaagatgggaataaatggctttacaaaaacaaagaacatggaatgcttagtgctactgcttctttgggactaattcttttatgggatgtagacggtggtcttactcctatcgataaatacttgtactcttctgaagaccatatcaagtctggcgctttattagcttgtggcattgtaaactgcggtgtcaggaatgaatgtgatcccgcacttgcacttttaagtgattatgttcttcacaacacaaacataatgagaataggagctattgtaggtctaggtttagcgtatgttggttcaaatagggaagcagtattatctctaatcacgcctgtgctatctgaccctaaatcaaatatggaggtcattggaatggcggctctagcatgcggaatgatttctgcaggatctggtaactcacatgtgacaacatcaataatgcaagttcttatggaaaagtccgaaatagaattaaaggacacttacgccagatttttgcctctgggtcttggattgtgtcatttaggtaaacaagaaagcattgacacaattatagcagcattagaagttatacctgaccctttcagatccatggcgactactatggtcgatatttgcgcttatgcaggcacaggaaatgttttaaaagtacaacatttgttacatatatgttcagaacattacgatgctcctgaaactcctgacaaaacttcaaaggacaaagataaaaaagaagcagagaaagaaaaagataaggatctttcagctagacaagctattgcggttttgggtatagctttaattagcatgggagaagacattggtagcgagatggctttccggacatttggtcatttactaagatactgcgaaccagcgatcagacgtgctgttcccttagccctaggcttaatctcagtttcaaatccaaaattaagtattctcgatactttgagtaaattttcacatgatagcgatgctgaagtggctcataatgccatctttgcgatgggtctggtgggagctggtactaacaatgcaaggttagcagctatgctaagacagttagcacagtaccatgccaaagatcccaataatttatttatggttcgcatcgcccagggtctcactcatcttggcaaaggaactttaactctcagtccattccacagtgataggcagctgatgagtccagtagctgtagctggtctaatggcgacactcatcggcttcttggatgttaaaaacattatattggggaagtcacactacttactgtacaccttagcagctgcaatgcaaccaaggatgttagtcacatttgacgatgagctaaatcctctaccagtgcctgtcagagttggattggcagtggatgttgttggccaagcaggaaaaccaaagactataacaggtttccaaacccataccactcctgtgcttctggcttatggtgagcgcgctgagctcgcaactgaagaatacattgcattgacgccaattatggaaggatttgttattttacgaaaaaatcctgaatttaattcataaatatattatttccgtcattgtttatcatgttccgcaattttttgatttaatatacttttttgtattaatcgatatttattaaatattgctcacgttttgattgaaaaccctaattgttcataacctcttcaatatctgtatatttgcattgaaaatatctgaatctgtatattttaagaaaaaatcgcgaatttaattcataaatatagataaaagtatagggacaaaattatggagcccatttctctaaagtggacgattttggaga

SEQ ID NO: 193 - DNA, 358 bp, Diabrotica virgifera
  misc_feature (1)..(358): RNAi target sequence
  misc_feature (267)..(267): n can be any nucleotide
cagcagtggtacagcaatcaaatgtaaacgattatttactaaaaaaacaacaagaaagtactaaagaattaggctcagaatgggccgaacttgaagaacttcataataaaaaattgtggcatcagttgactctaaaattgctgaattttattaagaaaccagaactacagaagaatgataacctcattcaactgtacaataactttattcaaagttttgaaaataaaatcaatcctttgtcattggttgaaattgttgctatagtantccaacaattcaaaaatccaaaagatgctgtcgcttttcttgaaaagactgaacctaaggttaaaattaattcaagatgcccaaaacttgt

SEQ ID NO: 194 - DNA, 21 bp, Artificial Sequence
  primer
  misc_feature (1)..(21): forward primer
cagcagtggtacagcaatcaa

SEQ ID NO: 195 - DNA, 21 bp, Artificial Sequence
  primer
  misc_feature (1)..(21): reverse primer
acaagttttgggcatcttgaa

SEQ ID NO: 196 - DNA, 1241 bp, Diabrotica virgifera
  misc_feature (1)..(1241): WCRW transcript ta04679.001_diavv
taaaagcgaaaatggctgcagcagtggtacagcaatcaaatgtaaacgattatttactaaaaaaacaacaagaaagtcctaaagaattaggctcagaatgggccgaacttgaagaacttcataataaaaaattgtggcatcagttgactctaaaattgctgaattttattaagaaaccagaactacagaagaatgataacctcatacaactgtacaataactttattcaaagttttgaaaataaaatcaatcctttgtcattggttgaaattgttgctatagtagtccaacaattcaaaaatccaaaagatgctgtcgcttttcttgaaaagactgaacctaaggttaaaattaattcagatgcccaaaacttgtgcaaagttttagctgggcagatatatatcgaaaagttgaacgatttagatgctactaaaaagataattgaagaagtggaatctacattggacaatgctgatggtgttactccagttcatggaagattttatttacttgcctcacaatattatagaattcaaggaaaccatgctcaatattataggacagcattgagatatcttggatgcatagagttggatacaataacatcagaagtgaaagtgcaacacgctttctttttgggtttggctgctctattaggcgaaggtgtctataacttaggtgaattactcgcacatcccgttttggagtccctaaaatcaacagaaaatgcgtggttggtagaattgttgtatgcttttaattctggcaatattaaaaagtttgagtccatgaaaccgcagtgggaagctatagcagatcttgcagctgaagaattatttttacgacaaaaaatatccctgttgtgtcttatggagatgacatttaatagaccatcgcacaacaggcaattaacatttgcagaaatcgcaaaagaaacaaaattacctttgaatgaaattgaattattgattatgaaagcgttgtcccaaggactagtcaaaggagccattgatcaggttgccaataccgtaaatatgacctgggttcaacctagagttttggattgtacgcagatttccaacatgattactaggcttaacgattggtgtaaacatgttgataccatggagcaattgctggaagaaaaagctagtgaaatattaacattgtaatttgtaattattaataatttatatattcgtccttaatttttttttaaggttttctcactgataataaaa

SEQ ID NO: 197 - DNA, 410 bp, Diabrotica virgifera
  misc_feature (1)..(410): RNAi target sequence
tggaggtgataacgaggtacaacgtactatgttagaacttatcaatcagttggatggttttgatcctagaggtaacattaaagtacttatggctacaaatcgtccagatactctagatcctgcccttatgagacctggtcgtttggatcgtaaagttgaatttggacttccagaccttgaaggaagaactcatattttcaaaattcatgctaggtccatgtctgttgaaagagatattcgttttgaacttttggctaggttgtgtccaaattccactggagctgaaatcagaagtgtttgtaccgaagctggtatgttcgctataagagcaaggaggaaagtagctaccgaaaaagacttcttagaagctgtaaataaagtaattaagtcatacgccaagttctctgcta

SEQ ID NO: 198 - DNA, 22 bp, Artificial Sequence
  primer
  misc_feature (1)..(22): forward primer
tggaggtgataacgaggtacaa

SEQ ID NO: 199 - DNA, 22 bp, Artificial Sequence
  primer
  misc_feature (1)..(22): reverse primer
tagcagagaacttggcgtatga

SEQ ID NO: 200 - DNA, 1452 bp, Diabrotica virgifera
  misc_feature (1)..(1452): WCRW transcript ta07921.001_diavv
ttatttaaaactaaatctatgaaaaatattgttcttaaaatatttttcatagatttagttttaaataaagacaattaagatgccggaccatttaggagatgatatgcgaaaaataaaagaacagaaagaggagcccgaaaaggaaattaaagccctggatgaaggtgatatagcacttcttaaaacctatggacaagggcaatacacaaagacaattaaaacatgtgaagaagatatccaaacgataatcaaaagagtaaatgaattaactggtataaaagaatctgatactggtttagctccaccagctttatgggatttggcagctgacaaacaaaccttacaaaatgagcaacccttacaagtggcccgttgtacgaaaattatcaacgctgatacagatgatcccaaatacattataaacgttaaacagtttgccaaattcgtagtagatttggcagactctgtggcccctacagacatagaagaaggcatgagagttggagtcgaccgaaataagtatcaaattcatattcctctacctccaaaaattgatcccactgtgactatgatgcaagttgaggagaagcctgatgttacatacagtgatgttggtggctgcaaggaacaaattgaaaagttgagagaagttgttgaaacacctttactccatcctgaaaaatttgtaaaacttggtattgaaccaccaaaaggcgttctcctttttggcccccctggaactggtaaaactctttgtgctagagcagtagccaatagaacagatgcctgctttattcgtgtaattggttctgaactggttcagaagtacgtaggagagggagcaagaatggttagagaacttttcgaaatggctaggtctaagaaggcctgcttgatattctttgatgaaattgatgccattggtggagccagatttgatgatggcgctggaggtgataacgaggtacaacgtactatgttagaacttatcaatcagttggatggttttgatcctagaggtaacattaaagtacttatggctacaaatcgtccagatactctagatcctgcccttatgagacctggtcgtttggatcgtaaagttgaatttggacttccagaccttgaaggaagaactcatattttcaaaattcatgctaggtccatgtctgttgaaagagatattcgttttgaacttttggctaggttgtgtccaaattccactggagctgaaatcagaagtgtttgtaccgaagctggtatgttcgctataagagcaaggaggaaagtagctaccgaaaaagacttcttagaagctgtaaataaagtaattaagtcatacgccaagttctctgctacaccaagatatatgacttacaattaattttaaagattttctaattatcgaattatttaaattgcgtttctaaataaataatccttttttagtgt

SEQ ID NO: 201 - DNA, 458 bp, Diabrotica virgifera
  misc_feature (1)..(458): RNAi target sequence
tctcctgaagggaggttgtatcaggtggagtatgccatggaggctatttctcatgcaggtacttgtctgggcattttagcaaatgatggaattttgttggctgctgagaggcgtaacactaacaaattattagatgaagtttttatttcagaaaaaatatacaaactaaatgatgatatggtttgtagtgtggctggaataacatcagatgctaatgttttaacaaatgaattgagacttataggtcaaagatatttatttcagtatgccgaatctattccttgcgaacagttagtttcctggctttgtgatgtcaagcaggcatacactcagtatggaggtaaacgtccatttggtgtttcaatattatatatgggatgggataaacattatggataccagctatatcagtcagatcccagtggcaactattctggttggaaagctacctgcatagg

SEQ ID NO: 202 - DNA, 22 bp, Artificial Sequence
  primer
  misc_feature (1)..(22): forward primer
tctcctgaagggaggttgtatc

SEQ ID NO: 203 - DNA, 22 bp, Artificial Sequence
  primer
  misc_feature (1)..(22): reverse primer
cctatgcaggtagctttccaac

SEQ ID NO: 204 - DNA, 892 bp, Diabrotica virgifera
  misc_feature (1)..(892): WCRW transcript ta04612.001_diavv
tttaaattttctaggctcagtatttttagctatattgagtatcaactaaaactatggctcgtcgatatgataccagaaccacaatattctctcctgaagggaggttgtatcaggtggagtatgccatggaggctatttctcatgcaggtacttgtctgggcattttagcaaatgatggaattttgttggctgctgagaggcgtaacactaacaaattattagatgaagtttttatttcagaaaaaatatacaaactaaatgatgatatggtttgtagtgtggctggaataacatcagatgctaatgttttaacaaatgaattgagacttataggtcaaagatatttatttcagtatgccgaatctattccttgcgaacagttagtttcctggctttgtgatgtcaagcaggcatacactcagtatggaggtaaacgtccatttggtgtttcaatattatatatgggatgggataagcattatggataccagctatatcagtcagatcccagtggcaactattctggttggaaagctacctgcataggcaacaacagttcagcagcaatttcaagtttgaaacaagaatataaagaaggtcaaatgactttgaaggatgcaaagacgttagcagtaaaggttctggcaaaaacattggatatggcaaaactaacttcagaaaaagtggaaatggctacacttacccgcaaaaatgataaaaccatgattaaaattttaagcggcaaggaagtagaagaactgatttcagagtatgaaaaaagtgaagctgccgcagaagctagcaaaaaagagcagaaggcatcagcttaattacatttatttggttttgtttaggttcactaagtatgtcattgtcacaatatgaataaatg

SEQ ID NO: 205 - DNA, 453 bp, Diabrotica virgifera
  misc_feature (1)..(453): RNAi target sequence
tgcagcttatagtggctgaaaagagtcaaaatcttagacgtttgcaagctcagagaaatgaactcaatgccaaagttcgtatgttgagagaagaactgatgttacttcaagagcaaggaagctatgtcggagaagttgtaaagcccatggataagaaaaaagtccttgtgaaagttcatccagaaggaaaatttgtagttgacattgacaaaaacatagacataaatgatgttactccaaattgtcgagtagccctcagaaatgaatcttacacattgcacaaaatacttccaaacaaggttgatcctttagtttccttgatgatggtggagaaagtccctgattcaacttatgaaatggtaggaggacttgacaagcaaattaaagaaatcaaagaagtaattgaacttccagttaaacatccagaactttttgatgctcttggtattgcac

SEQ ID NO: 206 - DNA, 22 bp, Artificial Sequence
  primer
  misc_feature (1)..(22): forward primer
tgcagcttatagtggctgaaaa

SEQ ID NO: 207 - DNA, 22 bp, Artificial Sequence
  primer
  misc_feature (1)..(22): reverse primer
gtgcaataccaagagcatcaaa

SEQ ID NO: 208 - DNA, 1322 bp, Diabrotica virgifera
  misc_feature (1)..(1322): WCRW transcript ta01297.001_diavv
aaactcccggagtgcaaaaaactatcaagaatgacggtaattaacaagatggaggtggacggaggtccgaagggagaaggttttcggtcatattatattacaaagattgaagaattgcagcttatagtggccgaaaagagtcaaaatcttagacgtttgcaagctcagagaaatgaactcaatgccaaagttcgtatgttgagagaagaactgatgttacttcaagagcaaggaagctatgtcggagaagttgtaaagcccatggataagaaaaaagtccttgtgaaagttcatccagaaggaaaatttgtagttgacattgacaaaaacatagacataaatgatgttactccaaattgtcgagtagccctcagaaatgaatcttacacattgcacaaaatacttccaaacaaggttgatcctttagtttccttgatgatggtggagaaagtccctgattcaacttatgaaatggtaggaggacttgacaagcaaattaaagaaatcaaagaagtaattgaacttccagttaaacatccagaactttttgatgctcttggtattgcacaacctaagggtgtgttgttatatggaccaccaggcactggaaaaactcttctggcacgtgctgtagctcatcacacagagtgtacatttattagagtatctggttcagaattggtacagaaattcataggagaaggatcccgtatggtaagagaactcttcgtaatggccagagaacatgctccttcaattattttcatggatgaaattgattccattggatcttcccgtattgaatcaggatctggtggtgattctgaagtccaaagaaccatgttggaacttctaaatcaattggatggttttgaagctaccaaaaacatcaaagtaattatggctaccaacagaattgatattttggatcccgctttactcagaccaggaagaattgacagaaaaattgaattccccccaccgaacgaagaagctagattggacatcttaaagattcactccagaaaaatgaacctcacaagaggaataaatctgagaaaaatagctgagttgatgccaggtgctagtggagctgaagttaagggtgtgtgtacggaagctggtatgtatgcactaagagaacgaagggtgcatgttactcaagaagattttgaaatggccgtcgccaaagttatgcagaaggattctgagaagaatatgtccatcaagaagttgtggaaataagttttttgtactacttaatatgtgattattttttaagaaataaaatatagcgaatagataaaaaaaaaaaaaaaaaa

SEQ ID NO: 209 - DNA, 488 bp, Diabrotica virgifera
  misc_feature (1)..(488): RNAi target sequence
gttaagatgccggaccatttaggagatgatatgcgaaaaataaaagaacagaaagaggagcccgaaaaggaaattaaagccctggatgaaggtgatatagcacttcttaaaacctatggacaagggcaatacacaaagacaattaaaacatgtgaagaagatatccaaacgataatcaaaagagtaaatgaattaactggtataaaagaatctgatactggtttagctccaccagctttatgggatttggcagctgacaaacaaaccttacaaaatgagcaacccttacaagtggcccgttgtacgaaaattatcaatgctgatacagatgatcccaaatacattataaacgttaaacagtttgccaaattcgtagtagatttggcagactctgtggcccctactgacatagaagaaggcatgagagttggagtcgaccgaaataagtatcaaattcatattcctctacctccaaaaattgatcccac

SEQ ID NO: 210 - DNA, 22 bp, Artificial Sequence
  primer
gttaagatgccggaccatttag

SEQ ID NO: 211 - DNA, 22 bp, Artificial Sequence
  primer
  misc_feature (1)..(22): reverse primer
gtgggatcaatttttggaggta

SEQ ID NO: 212 - DNA, 1425 bp, Diabrotica virgifera
  misc_feature (1)..(1425): WCRW transcript 454run3_isotig16670
aaaatttgcttgtaatcttgcacaaaaatattttaagaacaatatttttcatagatttagttttaaataaagacaattaagatgccggaccatttaggagatgatatgcgaaaaataaaagaacagaaagaggagcccgaaaaggaaattaaagccctggatgaaggtgatatagcacttcttaaaacctatggacaagggcaatacacaaagacaattaaaacatgtgaagaagatatccaaacgataatcaaaagagtaaatgaattaactggtataaaagaatctgatactggtttagctccaccagctttatgggatttggcagctgacaaacaaaccttacaaaatgagcaacccttacaagtggcccgttgtacgaaaattatcaacgctgatacagatgatcccaaatacattataaacgttaaacagtttgccaaattcgtagtagatttggcagactctgtggcccctacagacatagaagaaggcatgagagttggagtcgaccgaaataagtatcaaattcatattcctctacctccaaaaattgatcccactgtgactatgatgcaagttgaggagaagcctgatgttacatacagtgatgttggtggctgcaaggaacaaattgaaaagttgagagaagttgttgaaacacctttactccatcctgaaaaatttgtaaaacttggtattgaaccaccaaaaggcgttctcctttttggcccccctggaactggtaaaactctttgtgctagagcagtagccaatagaacagatgcctgctttattcgtgtaattggttctgaactggttcagaagtacgtaggagagggagcaagaatggttagagaacttttcgaaatggctaggtctaagaaggcctgcttgatattctttgatgaaattgatgccattggtggagccagatttgatgatggcgctggaggtgataacgaggtacaacgtactatgttagaacttatcaatcagttggatggttttgatcctagaggtaacattaaagtacttatggctacaaatcgtccagatactctagatcctgcccttatgagacctggtcgtttggatcgtaaagttgaatttggacttccagaccttgaaggaagaactcatattttcaaaattcatgctaggtccatgtctgttgaaagagatattcgttttgaacttttggctaggttgtgtccaaattccactggagctgaaatcagaagtgtttgtaccgaagctggtatgttcgctataagagcaaggaggaaagtagctaccgaaaaagacttcttagaagctgtaaataaagtaattaagtcatacgccaagttctctgctacaccaagatatatgacttacaattaattttaaagattttctaattatcgaattatttaaattgcg

SEQ ID NO: 213 - DNA, 553 bp, Diabrotica virgifera
  misc_feature (1)..(553): RNAi target sequence
  misc_feature (485)..(485): n can be any nucleotide
caaaggaactcgcagagcttataaaggccaccaggccttttttgagtttaataagcaaagcaaaagctgctaaattggtaaggtctctagttgactacttcctagatttagaagctggtattggtatcgaagtacaactctgcaaagaatgtatagaatgggcaaaggaagagagaagaacttttctacgtcagtcccttgaagccaggctgattgctctttattttgacactggaatgtacagcgaagcgctacaactggaatcgaccttactgaaagagttaaaaaagttggatgacaaaaatttgttggtggaagtacaactacttgaaagcaaaacatatcatgctttaagtaatttaccgaaggctagagctgcactaacttcagcacgaaccacagctaacgctatctattgccctccaaagatgcaggcagctttagatttacaatccggagtattacacgctgcagatgagaagganttcaaaacagcttattcttatttttatgaagcttttgaaggttttgatagtgttgaatccccaaaagc

SEQ ID NO: 214 - DNA, 22 bp, Artificial Sequence
  primer
  misc_feature (1)..(22): forward primer
caaaggaactcgcagagcttat

SEQ ID NO: 215 - DNA, 22 bp, Artificial Sequence
  primer
  misc_feature (1)..(22): reverse primer
gcttttggggattcaacactat

SEQ ID NO: 216 - DNA, 1860 bp, Diabrotica virgifera
  misc_feature (1)..(1860): WCRW transcript ta03917.001_diavv
gggtcagatccgatcatattaacgtgaaaagcatatttatgacagacaaattaatggaagtttagtagtgagtagtgaaaaaatatggccggagcaatgttatttgaaagagccccgtctgtttcttctcaacacgagaagcttttaaaattatccagggattcagatgatgaagatcaaaatattgtcaataaagaacaagacatccttaatcttggtgagaaatataaaaaggagggcaaggcaaaggaactcgcagagcttataaaggccaccaggccttttttgagtttaataagcaaagcaaaagctgctaaattggtaaggtctctagttgactacttcctagatttagaagctggtattggtatcgaagtacaactctgcaaagaatgtatagaatgggcaaaggaagagagaagaacttttctacgtcagtcccttgaagccaggctgattgctctttattttgacactggaatgtacagcgaagcgctacaactggaatcgaccttactgaaagagttaaaaaagttggatgacaaaaatttgttggtggaagtacaactacttgaaagcaaaacatatcatgctttaagtaatttaccgaaggctagagctgcactaacttcagcacgaaccacagctaacgctatctattgccctccaaagatgcaggcagctttagatttacaatccggagtattacacgctgcagatgagaaggatttcaaaacagcttattcttatttttatgaagcttttgaaggttttgatagtgttgaatccccaaaagccctcacagcccttaaatacatgcttttgtcaaaaatcatgataaacagtccggaagacgtccaacaaatcgttagtggtaaattggcctttaaatacgctggtcaagatatagaggctatgaaatcagttgcacaggctgcacacaaaagatcactagcagatttccaacaagctgtaaaacagtttaaacatgaattagaagatgatgttattgttagagcacatttaggaacgttgtatgacaatatgttggagcagaacctttgcagaattatcgaaccatattctagggtacaagtagagtatgtagcaaaaaccataaaactcccagtactacaagtagagaagaaattgtcacagatgattttagatgccaagtttcatggaattttggaccaaggcgaaggtgtcctcatagtattcgaagaaagtgcagtagacaaaacatatgaaatggccctagaaacgatccagagtatgagcaaagtagtagatactctttatcaaaaagcaaagaaattgtcataggtataatgtagccgagaatgttatgaaaataataaaatgactgtaaatttttcagaactagattttttgtagacactgtgtttatataacctatttaatttgcttttgttaattcttgtctttttaaggattcttataactcatagttttcggagcttgagggttttggatgtgatggagtttttttgttaatacagtatagatattttttaagatacttaaagcttatctaaatctaggaaaatatcatgcctaaagtcataagagattcataatccatatgtaactaactcatagaactattttctttataatattttttacaagcaatgaaataaaagcctcaaaaaatagactgaactttagagactttaggcattgagttttggtctttattgggaaaatattaatacaaaagttctataagaaatatctttgtatggtttattaattcattttttaacctgccaagacattgtgatctctattactatcagtgtcattggcttgttttcatacaatttttccctaata

SEQ ID NO: 217 - DNA, 469 bp, Diabrotica virgifera
  misc_feature (1)..(469): RNAi target sequence
  misc_feature (294)..(294): n can be any nucleotide
  misc_feature (295)..(295): n can be any nucleotide
  misc_feature (296)..(296): n can be any nucleotide
  misc_feature (385)..(385): n can be any nucleotide
  misc_feature (386)..(386): n can be any nucleotide
gtcaataccttttcacccgaaggaagattatttcaagtacaatatgccatacaagctattaagttaggatctaccgctattggaatatgcaccagtggtggagtagtgcttgctgtacaaaaacgcattacttccccattaatggaacctactacgattgagaaaattgtagaagttgacaaacatattggatgtgcggtttcaggacttatggcagattcaaggactatgatagatagagctcgtgtggaatgtcacaatcattggtttgtctacaatgaaaatataagtgtnnnatcctgtgcacaaggtgtatcaaatttggctattcagttcggatattctgatgaagatggtgcagccatgtctagaccttttggagtannaattttgtttgctggtatagatgaaaaaggacctcagttgtaccatatggatccatcaagaacatttgttcagtttgacgcaa

SEQ ID NO: 218 - DNA, 22 bp, Artificial Sequence
  primer
  misc_feature (1)..(22): forward primer
gtcaataccttttcacccgaag

SEQ ID NO: 219 - DNA, 21 bp, Artificial Sequence
  primer
  misc_feature (1)..(21): reverse primer
ttgcgtcaaactgaacaaatg

SEQ ID NO: 220 - DNA, 850 bp, Diabrotica virgifera
  misc_feature (1)..(850): WCRW transcript ta09615.001_diavv
gctattacaagtttcttttgtataagttttataaatattgttaatcgttaacatagtcctgtttacaaaatgtttcttacaagaagtgaatacgataggggagtcaataccttttcacccgaaggaagattatttcaagtagaatatgccatagaagctattaagttaggatctaccgctattggaatatgcaccagtggtggagtagtgcttgctgtagaaaaacgcattacttccccattaatggaacctactacgattgagaaaattgtagaagttgacaaacatattggatgtgcggtttcaggacttatggcagattcaaggactatgatagatagagctcgtgtggaatgtcagaatcattggtttgtctacaatgaaaatataagtgtagaatcctgtgcacaaggtgtatcaaatttggctattcagttcggagattctgatgaagatggtgcagccatgtctagaccttttggagtagcaattttgtttgctggtatagatgaaaaaggacctcagttgtaccatatggatccatcaggaacatttgttcagtttgacgcaaaggcgataggatcaggatccgagggtgcacagcaaagtttacaggaggcatatcatcgcagtatgaccctggaagaagctaccacaactgctttaacaattctaaaacaagttatggaagaaaagttgaattcttcaaatgttgaggttatgactatgactccaaaagatatgttccacatgttcacaaaggaacaagtggaagaggtaattgctaaattgtcttaacttaggaagtaagctaaattttgaaaagggttaattttatataagttttttt

SEQ ID NO: 221 - DNA, 404 bp, Diabrotica virgifera
  misc_feature (1)..(404): RNAi target sequence
  misc_feature (300)..(300): n can be any nucleotide
  misc_feature (301)..(301): n can be any nucleotide
  misc_feature (302)..(302): n can be any nucleotide
  misc_feature (338)..(338): n can be any nucleotide
  misc_feature (339)..(339): n can be any nucleotide
  misc_feature (340)..(340): n can be any nucleotide
  misc_feature (341)..(341): n can be any nucleotide
ttcggaagtaaaacaagtgctgcaggatgtggatactgaagatttgtacactaaatataaaaaacttcaacaacagttggagttcttggaggttcaagaagagtacattaaagatgagcaaaggaatctcaaaaaggagtatttacatgctcaggaagaagtgaagcgtatccagtctgtcccgcttgttattggacagtttttagaagctgtagatcaaaacactggcattgttggctcaactacaggttcaaattattatgttagaatcttatcaacaattgatagagaactcttaannnccttctgctagtgttgctcttcataaacacagcaannnncttagtagatgtcctaccaccagaggcagattcttcaataagcatgctccaggctgatgaaaa

SEQ ID NO: 222 - DNA, 22 bp, Artificial Sequence
  primer
  misc_feature (1)..(22): forward primer
ttcggaagtaaaacaagtgctg

SEQ ID NO: 223 - DNA, 20 bp, Artificial Sequence
  primer
  misc_feature (1)..(20): reverse primer
ttttcatcagcctggagcat

SEQ ID NO: 224 - DNA, 1364 bp, Diabrotica virgifera
  misc_feature (1)..(1364): WCRW transcript ta03370.001_diavv
aaaaaagtcaaaatttgaagaagaaaacaattttacaagtcatcaaccatggaggctatggatattgttataccagaaaaagaagaaggtagtccttcggaagtaaaacaagtgctgcaggatgtggatactgaagatttgtacactaaatataaaaaacttcaacaacagttggagttcttggaggttcaagaagagtacattaaagatgagcaaaggaatctcaaaaaggagtatttacatgctcaggaagaagtgaagcgtatccagtctgtcccgcttgttattggacagtttttagaagctgtagatcaaaacactggcattgttggctcaactacaggttcaaattattatgttagaatcttatcaacaattgatagagaactcttaaaaccttctgctagtgttgctcttcataaacacagcaatgccttagtagatgtcctaccaccagaggcagattcttcaataagcatgctccaggctgatgaaaaaccagatgttcaatacagtgacattggaggtatggatatgcagaaacaagaaattagggaagctgtagagttacctttgactcacttcgaattgtataaacagattggtattgatccccccagaggtgtgttgatgtatggacctcctggatgcgggaagactatgttggccaaagctgttgctcatcatactacagctgcctttattcgtgtagtcggatcagaattcgtacagaaatatcttggtgaaggtcctcgaatggttagagacgtgttccgtctagcaaaagaaaattctccagcaatcatctttattgatgaaattgatgcaatcgctaccaaacgttttgatgcccagacaggtgctgatcgtgaagtccagagaattttattggaactgcttaaccagatggatggttttgatcagacaacaaatgttaaggttatcatggcaactaacagagctgatacattagatcctgcacttctgagacctggtcgtctggacagaaaaatcgaatttcctttaccagatagaagacaaaagcgtttgattttcagcactatcacatctaaaatgaatttgtcagaggaggtcgacttggaggactatgtagctagaccagacagaatatcaggagcagacataaacgccatctgccaggaagccggtatgcatgccgtccgagaaaaccgttacatcgttttacctaaagatttcgagaagggttataagaataacattaagaaggatgagagcgagcacgagttttacaaatagtttatttatattttttattattactaatctaataaagacttgtaaaatgtatttgatgtcattgaatcaagtttacattaaaaaaa

SEQ ID NO: 225 - DNA, 455 bp, Diabrotica virgifera
  misc_feature (1)..(455): RNAi target sequence
cggaattaaatagtgcccaagatgaatatcacatctgcagcgggaattatttccctcttggatgaaccaagaccagaattaaaagtatttgcactgaagaaactagattccatagtgggtgagttttggccggagatctcagaagctatcgaaaaaatcgaaattttgcatgaagacaaagttttccagcaacaccagttagctgcacttgtggcaagtaaggtatattaccatttaggcgcttttgaagactctttaacttatgctcttggtgcgggtgatctctttgatgtcaatgcccggagtgagtatgtagaaactattctagctaaatgtatcgactattacactcagcaacgtattgctgtagctgaaggattggcagatgccaaacccatagactctcgccttgaagctattgttaatcgaatgtttcagaggtgtcttgatgatgg

SEQ ID NO: 226 - DNA, 22 bp, Artificial Sequence
  primer
  misc_feature (1)..(22): forward primer
cggaattaaatagtgcccaaga

SEQ ID NO: 227 - DNA, 22 bp, Artificial Sequence
  primer
  misc_feature (1)..(22): reverse primer
ccatcatcaagacacctctgaa

SEQ ID NO: 228 - DNA, 3242 bp, Diabrotica virgifera
  misc_feature (1)..(3242): WCRW transcript ta00483.001_diavv
tgaatatccacatcaaaaattgcattcattcaatgactgtgttgtttttccgacgtgaaagtttaaaaattacatttttcggaattaaatagtgcccaagatgaatatcacatctgcagcgggaattatttccctcttggatgaaccaagaccagaattaaaagtatttgcactgaagaaactagattccatagtgggtgagttttggccggagatctcagaagctatcgaaaaaatcgaaattttgcatgaagacaaagttttccagcaacaccagttagctgcacttgtggcaagtaaggtatattaccatttaggcgcttttgaagactctttaacttatgctcttggtgcgggtgatctctttgatgtcaatgcccggagtgagtatgtagaaactattctagctaaatgtatcgactattacactcagcaacgtattgctgtagctgaaggattggcagatgccaaacccatagactctcgccttgaagctattgttaatcgaatgtttcagaggtgtcttgatgatggtcaatatcgtcaagctatgggcctggctctagaaaccagacgaatggatatctttgagtcatctattactcagtctgatgatattatcagcatgttgacttatgcatttcaagtagcgatgagtttgattcaaaatcgagcatttagaaacactgttttgagatctcttgttggactttatagaggactggttacacctgattacgttaatatgtgccagtgcttaattttcctcgatgatccattgtctgtggctgaaattttagacaggcttgtaactggcaaggaggatactgaacttatggcatatcaaattgcttttgatctctatgagtcagctactcaacagtttttggaaagagtattagttgcattaagagccacagcaccagttccatctttgctggaagaaaaagcaaagccaaagccttctggtgaaggagagggtgctatgtcaaccgagactggagaaccatctacagaaacaaaagaagaaaaattaaaagaagaaaaatctctggatagtttgtctgatcaggataaggaacatcagaaaagaattgagaaacttcatactatactctcaggggaggtctctatagaactgcaccttcaattcctcatcaggtcaaatcatgctgatctactgattcttaaacaaacaaaagagactgtcagagttagtatttgccacactgctactgtaatcgcaaacgcatttatgcatagtggtactactagcgatcaatttttaagagataacttagaatggttagccagagcaacgaattgggccaaacttacagccacagcctcgctaggagttattcatagaggccatgaacaagaagcattaacactaatgcaaagttacttgccgaaagaagttggacccagctcaggttattccgaagggggcggcctttatgctcttggtcttatacatgccaaccatggtacaaatatcattgattaccttcttggacaacttaaggatgcacagaatgagatggtgagacatggaggttgtcttggtctaggtttggctgctatgggcactcatagacaggatgtttatgaacaactcaaattcaatttataccaagatgatgccaatactggtgaagcagctggtattgcaatgggaatggtaatgttgggttcaagtaattctaccacaattatggatatggttgcatacgcacaagagagtcaacatgagaaaattcttagaggcttagctgttggtattagtttttccatgtatggtagattagaagaagcagatccactgattcaacaacttacctctgataaagatcctatcctcagaagatcaggaatgtatactttgggtatggcatattgtggtactggacacaaccaagcaattagaaaactacttcatgtagctgtgtcagatgtcaacgatgatgttagaagagctgcagttacagctttaggttttctgttattcagaactcctgaacaatgtcctagtgtagtatcccttctagctgagagttacaatccacatgtacgttatggagctgctatggctcttggtattgcatgtgcaggaactggtctacgtgaagctatagctcttctcgaacctatggttatgtttgatcctgtaaacttcgtaagacagggtgctctcattgcttctgctatgattttaattcaacagactgaacaaacttgccccaaagtcacattcttcagacagacatatgctcaagtcatttccaacaaacacgaagatgtgatggccaagtttggagctatcttagctcaaggaatcatcgatgcaggtggaagaaatgtaactttgtcgctacagtccagaactggccacacaaatatgttagctgtagttggtacactggtgttcactcagtactggtactggttccctctatcacattgtttagctttagcattcactccaacatgtgtgattggtcttaatgcacaattgaagatgcccaaattagacttcaaatccaatgccaaacctagtctatatgcttatccagctccaatggaagaaaagaaaagagaagaaagagaaaaggtaactactgccgttttaagtattgctgcccgccaacgtagaagagaccatgaaagaaagcatcgtgacgaaaagatggaagtagatgaagacaaagatgacaagaaaacagaaaaagaagacaaggagaagaagtctgaagagaaagataaaaaggatgaaaagaaagctgatgacaaagataaagataaaaaagcagatgacaagaaagcatctacttctactggcgatgataagaagaaggatgaaaaggaagaaaagaagaaagaacctgaaccaaacttcgaagttttacagaatcctgctagagttatgaggcaacaattaaaggtgattacacttaatgatagcaatcaacatgtttcgatgaaagatgtttctattggaggaataatcatggtgagaaatttgaagcctggagatgaggaactggttgaacctgttgcagcttttggtcccaagggcgaggatgaaaaggaaccagaacctccagagccgtttgaatggacagaagattagatatcatcattaacatttttataatttttcatttaatttactataaatagatgtaattatacgaaaaacgacttttgttaacatttaatattaaattattagtttagcg

SEQ ID NO: 229 - DNA, 701 bp, Diabrotica virgifera
  misc_feature (1)..(701): RNAi target sequence
agctcgcttttatatgagatccgcaacgttcataggcatttcatctatctttgtattatagaactgttcgatatccttaagcgtgcgtttatcatcgtccgttacgaaatttattgctacacccttacgaccaaatcgaccacctcgaccaatcctgtgaatgtaattttctctattagaaggcaaatcataattaataactagggaaacttgctgtacatctatacctctcgctaacagatcagtggttattaaaaccctagatgatcctgttctgaactgacgcataataacgtcacgctctctttgttccatatcaccatgcatagcggaaacagtgaagtctctcttgtgcatgttttctgttaaccaatcgaccttgcgacgggtattgcaaaagattacagcctgcgtaatcgaaagagtatcatagagatcacataatgtctctaatttccaatcttctttttctacatatacataaaattgtttaataccttctaaggtaagttcctcttttttgacaagtatccgaacaggactcctcataaaggattttgtcacgtctagcacatcgtttggcatggtagccgaaagtaaaattacctgtacgtcagtgttcaacattttgaacacgtcatgaatttgatctttaaaaccccttgacaacatttcatcggcttcatccaaaacaaacattt

SEQ ID NO: 230 - DNA, 27 bp, Artificial Sequence
  primer
  misc_feature (1)..(27): forward primer
agctcgcttttatatgagatccgcaac

SEQ ID NO: 231 - DNA, 28 bp, Artificial Sequence
  primer
  misc_feature (1)..(28): reverse primer
aaatgtttgttttggatgaagccgatga

SEQ ID NO: 232 - DNA, 2338 bp, Diabrotica virgifera
  misc_feature (1)..(2338): WCRW transcript ta03651.003_diavv
aaacgaccacagacagactcactttcaggtaaaaaaatcctaacttatttgttaccacaagttagaagtggttaaaagcatcctagaagccactaagtgaattgcaatacctgggcggagcgacagtattcctatcacttcaaacttcaattcagggggcttttccgtttagctatacgcgaagtagacatgtctatgccagatcgtcgtgaagagtgggacaagaatggcccagctaatgaagacagccagccccaaggctatgacggcccaccaggtatggagcctgatggcattattgaatccaactgggaagaggtggtcgataatttcgacgacatgaacctaaaagaggaacttttaagaggaatttatgcctatggttttgaaaaaccttctgctatccaacagagagccatcattccttgtgtaaagggacacgatgttattgctcaggctcagtcaggtactggtaagactgcaacattctccatctctattttacaacaaattgacacgtcagtgagggagtgccaagctcttatattggcaccaactcgtgaattggctcaacagatccaaaaagtagtaattgccctaggagatttcatgtcagcgcagtgtcatgcatgtattggtggtaccaatgtacgagaagacataagaaaacttgaaactggcgtacatgttgttgttggtacacctggtagagtttacgatatgataacgaggagagccctaaggccgactcatattaaaatgtttgttttggatgaggctgatgaaatgttgtcaaggggttttaaagatcaaattcatgacgtgttcaaaatgttgaacactgacgtacaggtaattttactttcggctaccatgccaaacgatgtgctagacgtgacaaaatcctttatgaggagtcctgttcggatacttgtcaaaaaagaggaacttaccttagaaggtattaaacaattttatgtatatgtagaaaaagaagattggaaattagagacattatgtgatctctatgatactctttcgattacgcaggctgtaatcttttgcaatacccgtcgcaaggtcgattggttgacagaaaacatgcacaagagagacttcactgtttccgctatgcatggtgatatggaacaaagagagcgtgacgttattatgcgtcagttcagaacaggatcatctagggttttaataaccactgatctgttagcgagaggtatagatgtacaacaagtttccctagttattaattatgatttgccttctaatagagaaaattacattcacaggattggtcgaggtggtcgatttggtcgtaagggtgtagcaataaatttcgtaacggacgatgataaacgcacgcttaaggatatcgaacagttctataatacaaagatagatgaaatgcctatgaacgttgcggatctcatataaaagcgagctaataaagagtgttggtgtgttctacgacgtctcctgaagtatctttggtgtgagtattagctttctatgctaaatctgctgcgacatatatatgcgaatattgtgcgctgcgccccatcacgtttctttaggacaacgccgttcgaggcacaatcatccacgaactctctgagtgtcaatttttaaatatatttaattgtttcggtttaatctctagtgtatttttaattttttgatatacatatagttagtgtttattatcattcgggagacgtgtggctgtatggaggcccgaggtcccctcgtttcgaggggtaccgacggtcgtaggcgtgttgtgatttgctccacacagttcgttcgtctctgtaagggtttagttggtatctggaaaggttattataatcgtaaaagatgtagaaggaaattctggattatcacatagactttttgtacattaagacttaataaaagtggtgataaaattcgttgccttttctttatgttttattataactggtgtgtctaaagatttgttgaattgtgaatctgcatatatactgtttagagagagactcacaggtgagtaatcgtactgtttgaacagaaactttatagtacattcttagtttcattctgtgttatatttgtttaataatcacagttaaagttaacacaaaatgcaaaaaacactaacataaacttttgatgttgatagtttgttgaaattatcttccgtgtttgttatagttttttttggctctagcttttgtaaaagtaataatcattagcgaactagtaggcctatggcttgattgaccattcttcatcctttcttgttcattgctttcatcctccaatttgtgatgttgagtttttt

SEQ ID NO: 233 - DNA, 669 bp, Diabrotica virgifera
  misc_feature (1)..(669): RNAi target sequence
gtgaagagtgggacaagaatggcccagctaatgaagacagccagccccaaggctatgacggcccaccaggtatggagcctgatggcattattgaatccaactgggaagaggtggtcgataatttcgacgacatgaacctaaaagaggaacttttaagaggaatttatgcctatggttttgaaaaaccttctgctatccaacagagagccatcattccttgtgtaaagggacacgatgttattgctcaggctcagtcaggtactggtaagactgcaacattctccatctctattttacaacaaattgacacgtcagtgagggagtgccaagctcttatattggcaccaactcgtgaattggctcaacagatccaaaaagtagtaattgccctaggagatttcatgtcagcgcagtgtcatgcatgtattggtggtaccaatgtacgagaagacataagaaaacttgaaactggcgtacatgttgttgttggtacacctggtagagtttacgatatgataacgaggagagccctaaggccgactcatattaaaatgtttgttttggatgaggctgatgaaatgttgtcaaggggttttaaagatcaaattcatgacgtgtttaaaatgttgaacactgacgtacaggtaattttactttcggctaccatgc

SEQ ID NO: 234 - DNA, 22 bp, Artificial Sequence
  primer
  misc_feature (1)..(22): forward primer
gtgaagagtgggacaagaatgg

SEQ ID NO: 235 - DNA, 22 bp, Artificial Sequence
  primer
  misc_feature (1)..(22): reverse primer
gcatggtagccgaaagtaaaat

SEQ ID NO: 236 - DNA, 1764 bp, Diabrotica virgifera
  misc_feature (1)..(1764): WCRW transcript 454run12_isotig05267
ttttcaccacttttattaagtcttaatgtacaaaaagtctatgtgataatccagaatttccttctacatcttttacgattataataacctttccagataccaactaaacccttacagagacgaacgaactgtgtggagcaaatcacaacacgcctacgaccgtcggtacccctcgaaacgaggggacctcgggcctccatacagccacacgtctcccgaatgataataaacactaactatatgtatatcaaaaaattaaaaatacactagagattaaaccgaaacaattaaatatatttaaaaattgacactcagagagttcgtggatgattgtgcctcgaacggcgttgtcctaaagaaacgtgatggggcgcagcgcacaatattcgcatatatatgtcgcagcagatttagcatagaaagctaatactcacaccaaagatacttcaggagacgtcgtagaacacaccaacactctttattagctcgcttttatatgagatccgcaacgttcataggcatttcatctatctttgtattatagaactgttcgatatccttaagcgtgcgtttatcatcgtccgttacgaaatttattgctacacccttacgaccaaatcgaccacctcgaccaatcctgtgaatgtaattttctctattagaaggcaaatcataattaataactagggaaacttgctgtacatctatacctctcgctaacagatcagtggttattaaaaccctagatgatcctgttctgaactgacgcataataacgtcacgctctctttgttccatatcaccatgcatagcggaaacagtgaagtctctcttgtgcatgttttctgttaaccaatcgaccttgcgacgggtattgcaaaagattacagcctgcgtaatcgaaagagtatcatagagatcacataatgtctctaatttccaatcttctttttctacatatacataaaattgtttaataccttctaaggtaagttcctcttttttgacaagtatccgaacaggactcctcataaaggattttgtcacgtctagcacatcgtttggcatggtagccgaaagtaaaattacctgtacgtcagtgttcaacattttaaacacgtcatgaatttgatctttaaaaccccttgacaacatttcatcagcctcatccaaaacaaacattttaatatgagtcggccttagggctctcctcgttatcatatcgtaaactctaccaggtgtaccaacaacaacatgtacgccagtttcaagttttcttatgtcttctcgtacattggtaccaccaatacatgcatgacactgcgctgacatgaaatctcctagggcaattactactttttggatctgttgagccaattcacgagttggtgccaatataagagcttggcactccctcactgacgtgtcaatttgttgtaaaatagagatggagaatgttgcagtcttaccagtacctgactgagcctgagcaataacatcgtgtccctttacacaaggaatgatggctctctgttggatagcagaaggtttttcaaaaccataggcataaattcctcttaaaagttcctcttttaggttcatgtcgtcgaaattatcgaccacctcttcccagttggattcaataatgccatcaggctccatacctggtgggccgtcatagccttggggctggctgtcttcattagctgggccattcttgtcccactcttcacgacgatctggcatagacatgtctactccgcg

SEQ ID NO: 237 - DNA, 628 bp, Diabrotica virgifera
  misc_feature (1)..(628): RNAi target sequence
tcattgtgtcctaaaggcatgatcataacgataagtcagcagatgcaaacatccaacttagaacatgccaatttctcttttttctagttttgtaattttttcttcatttatatctgggattaaaaactttattcctttaaatgtaacgttaatatatgaatctcataactagtgttaccccttagatttaaccaagagagaaaataacgctctggtctacatataagtaaacattgcctaatttaaattgatgtttcagaacattcgtcgcagaactcagtttctatgttaaacaacttggaagaactattcatggaagggatactggatctaataaacagactgcaagtaaaagttgtgccctatcagttgtgcgacaactttttcacttgaaagtcattgaagctttttcaggtatgtagaaatgtatatctttctttttaattcctttctctttttatacagagaggggctaaattgtggagtgaattgattttatctagaatggaccactttggagagaaatcgcgaaacgggtcgatttttatttttgaattacaatttttttgcatatgtttcatactggtgacgtcatccatctgggcgtgatgacgtagtcggtgatttt

SEQ ID NO: 238 - DNA, 22 bp, Artificial Sequence
  primer
  misc_feature (1)..(22): forward primer
tcattgtgtcctaaaggcatga

SEQ ID NO: 239 - DNA, 22 bp, Artificial Sequence
  primer
  misc_feature (1)..(22): reverse primer
aaaatcaccgactacgtcatca

SEQ ID NO: 240 - DNA, 697 bp, Diabrotica virgifera
  misc_feature (1)..(697): WCRW transcript ta41281.001_diavv
ttaaaaaaatcaccgactacgtcatcacgcccagatggatgacgtcaccagtatgaaacatatgcaaaaaaattgtaattcaaaaataaaaatcgacccgtttcgcgatttctctccaaagtggtccattctagataaaatcaattcactccacaatttagcccctctctgtataaaaagagaaaggaattaaaaagaaagatatacatttctacatacctgaaaaagcttcaatgactttcaagtgaaaaagttgtcgcacaactgatagggcacaacttttacttgcagtctgtttattagatccagtatcccttccatgaatagttcttccaagttgtttaacatagaaactgagttctgcgacgaatgttctgaaacatcaatttaaattaggcaatgtttacttatatgtagaccagagcgttattttctctcttggttaaatctaaggggtaacactagttatgagattcatatattaacgttacatttaaaggaataaagtttttaatcccagatataaatgaagaaaaaattacaaaactagaaaaaagagaaattggcatgttctaagttggatgtttgcatctgctgacttatcgttatgatcatgcctttaggacacaatgaagaaatgtaactcacagtttacttcttttatttaggtttttggataaggatttttttgaatccc

SEQ ID NO: 241 - DNA, 610 bp, Diabrotica virgifera
  misc_feature (1)..(610): RNAi target sequence
  misc_feature (560)..(560): n can be any nucleotide
ccttcaccaatttccccttactcgggggtaaatacaacagcggacagtacacttacaaaatctaccatttggccagcaaagtaccggcgttcataaggctcctggcaccgaaggggagtttggagatacacgaagaggcttggaatgcttacccatattgtaggaccgtcattacgaatcctggttatacgaaggagaattttgttatttgtattgaaagtatgcatattgctgataatggtcatcaggttaacgttcatgacttacccagtgacaaattgaaacaaagagaagtggtacacatcgacatcgctaatgatagtgtatcgtcgggagattacaaagatgacgaagatcctacgaagtttaagtctcaaaagacgggcaggggaccgctcgtgggtcctgattggaaggacaaagtcaatcctgtgatgacgtgttataaattagtaactgtagaattcaaatggtttggtttacagacgaggatagaaagttttatacaaaaatctgaaaggcggctatttacaaatttccatagacaagttttctgttgnatggaccgctggcacggtctgacgatggaagacatccgtgcaatagaaga

SEQ ID NO: 242 - DNA, 22 bp, Artificial Sequence
  primer
  misc_feature (1)..(22): forward primer
ccttcaccaatttccccttact

SEQ ID NO: 243 - DNA, 23 bp, Artificial Sequence
  primer
  misc_feature (1)..(23): reverse primer
tcttctattgcacggatgtcttc

SEQ ID NO: 244 - DNA, 800 bp, Diabrotica virgifera
  misc_feature (1)..(800): WCRW transcript ta20868..001_diavv
  misc_feature (715)..(715): n can be any nucleotide
aattgcagcaaagaaaacatgctgattaaagaataccgtgtgaccctacccctcacagtcgaagagtaccaagtggctcaactattcagcgtggcagaggcttccaaagacaacactggcggcggagaggggatagaagtattgaaaaatgaacccttcaccaatttccccttactcgggggtaaatacaacagcggacagtacacttacaaaatctaccatttggccagcaaagtaccggcgttcataaggctcctggcaccgaaggggagtttggagatacacgaagaggcttggaatgcttacccatattgtaggaccgtcattacgaatcctggttatacgaaggagaattttgttatttgtattgaaagtatgcatattgctgataatggtcatcaggataacgttcatgacttacccagtgacaaattgaaacaaagagaagtggtacacatcgacatcgctaatgatagtgtatcgtcgggagattacaaagatgacgaagatcctacgaagtttaagtctcaaaagacgggcagaggaccgctcgtgggtcctgattggaaaggacaaagtcaatcctgtgatgacgtgttataaattagtaactgtagaattcaaatggtttggtttacagacgaggatagaaagttttatacaaaaatctgaaaggcggctatttacaaatttccatagacaagttttctgttgnatggaccgctggcacggtctgacgatggaagacatccgtgcaatagaagataaaacaaaagaagaactagaagctctccgtcaaa

SEQ ID NO: 245 - DNA, 524 bp, Diabrotica virgifera
  misc_feature (1)..(524): RNAi target sequence
ggttgccgtcgtttagtagaagtgtcatttttgtctgctctcgttttcatcttttgtgtataaaattggtgctaaggtagataaactatattcgaataggcgtttttatgtcgcaagaaagtgttttgtatatttgtgatacgtgatctcgtagagggagtccagaaattcataatttatagttaagtaaaaatggcggcaaacagaactggacctgctcagagaccaaatggcgctacccaaggaaagatatgtcagttcaaactggtcctactaggcgaaagtgccgtcggtaagtcgagtttggtactgaggttcgtcaaaggacagttccacgaataccaggagagtaccataggagcagctttccttacacaaaccatatgcctcgacgatacaactgttaaatttgaaatttgggacacagcgggtcaagaaaggtaccacagtttagctcctatgtactataggggcgcacaggcagctatagtcgtctacgacataaccaatcaagacacattcgg

SEQ ID NO: 246 - DNA, 22 bp, Artificial Sequence
  primer
  misc_feature (1)..(22): forward primer
ggttgccgtcgtttagtagaag

SEQ ID NO: 247 - DNA, 22 bp, Artificial Sequence
  primer
  misc_feature (1)..(22): reverse primer
ccgaatgtgtcttgattggtta

SEQ ID NO: 248 - DNA, 3182 bp, Diabrotica virgifera
  misc_feature (1)..(3182): WCRW transcript ta01834.005_diavv
ctcaaatattggcagccttgttgacgtcgtttagtagaagtgtcatttttgtctgctctcgttttcatcttttgtgtataaaattggtgctaaggtagataaactatattcgaataggcgtttttatgtcgcaagaaagtgttttgtatatttgtgatacgtgatctcgtagagggagtccagaaattcataatttatagttaagtaaaaaatggcggcaaacagaactggacctgctcagagaccaaatggcgctacccaaggaaagatatgtcagttcaaactggtcctactaggcgaaagtgccgtcggtaagtcgagtttggtactgaggttcgtcaaaggacagttccacgaataccaggagagtaccataggagcagctttccttacacaaaccatatgcctcgacgatacaactgttaaatttgaaatttgggacacagcgggtcaagaaaggtaccacagtttagctcctatgtactataggggcgcacaggcagctatagtcgtctacgacataaccaatcaagacacattcggcagggcgaaaacgtgggtgaaggaacttcaaaggcaggccagtccgacgatcgtgatagctttggccggcaacaagcaagatttggccaacaaacgtatggtagaatacgaagaggcgcagacgtatgctgacgaaaacggcttactttttatggaaacttccgcaaagacggcaatgaacgtcaacgatatatttttagcaatagctaagaaactgcccaagaatgaacaaaccacaggtcaaggcggcagtgcccaaggcaggcggctagcggagggcgattcgggcgccaaggcacccggaaattgttgcaagtgatggtatacgcctgcaggtcgagtgttgttattaaaccgtcacgagaaaggactggcaagtgcagcggcactctagtgatatctatgtgtaataaaggtccttctattaacaaaaaaaaattaataaaaaaatatattaaacttcatatacactgtcacatattccatttagatgatgaaaaacaaaagagcagaagcattttggtctctaacggtcatgttgagttggaatgtctcgtggggcatttaaatttgtgataattgtacctatattttgtttttttatatatataattaatatatctgacagtgtaagttaagcgtaaactgtttatatcgatcgtattagcagcaccaattaaaaaaataaataaaattgaagatcttttttattgtttttgtaattttaactctttggggaaggttacaaaagaattgataacgttgtgttgaaaacattgcattataataaagtaattccacccacttacgaattattttgaaaggagaatcaaaaatgtgtcaattgtcacctgtcatcttatgatgacactctatgagagtgggggcaattgcagcgcgcgcatactattcagtctagcttcattatgtcaattaaatatcgatgtgcattagaaatactgcctaattgaatattttcgacatatgattaaaatttcatcgattagtttgacagttcccaaatgaaaaaacagttacttccgcataaaaatgtattgcttcaaaacttactttcagtggcatttcagtgggttttagccatcttatggagagtggtctaacacactttctaggtacagctgtggtttttaaaaggaaatataatgaatcgcttttgttttcgaaatttacattgggaatcccttagtgtccttatatttgccctacagagtttcatttaaactgaaattgggtaatttacatagacctaaagctttcacgtctatatagcctaattagaccacaaaattgacttgctttacgtgaaatgtatgaaccattcaaacatatttatatgacaacaatataatataatacaatataatataaataactgacaacatttaaaattagaatttttacccacaatttttctctgccatgtgtcatctaatacaagaagtatggcaatttagccctactcctcttattgtacatttcttgtaattcctcattttctttttcaattacttcgatcttttaaacttaattcaccaagtttatttgcaatattgttcttgaagtctatagtttgaattccttcaatatatttgtaatgtttttcttcagtgtcaatccttgcattccatgaaagaacacgaaaaagatgcagcactttatttgtccatattcctgctacatagttatttttcgattaacacattcactgccagcgtatagtaaactggcactttactatacgctaaacaaaaatttggccttgcagattttcctaaaacacgtagcagctacgccactgaatggacttaggaccccctatcgtttcgctggttgcaatagtccggtaactagagacaaaagtgggtcattttgcacacttcatataattctcgttttctgtacttcacgagtattttttttgtcggatatgtattgaatagtatcggtgacaacacactgccctgcgtgacacccctttcaaaacctatgtgggaacaatatgtatctttagagaactttttgtacccttcccctaaaaactaaatattttttcacttagtgcaattttaatattagtctcaccttatttctagaatacggtcgatctaaatgtataatctcaactttcagcttatacttcgaaaaccgagaagtataaactgtaagaatatttaacgttatatgtattttattaggataatgattgttgaaagtatgtttcccaacacgtgtaagttacatttcgtactctttccatttttattacaaaaaaaaatgtttatttagataaactgttgcggaacatactttctcgatgcatgactgaaaagaacgttaacatttatacgtatttgtttttattttgtgtctgatgtgacaacccagatcttagcgaaagcgtagaggacaaaagatgagtttttaagtttcccattgaactttttccgtccttaaatcaaatacaacaactattcacttaagttttctaaacatttttgctaatatgggcccctgcaccattcccgacttaacagtcttcatttgtttttattaggtttgttcgtagtacgatccaaacgatcggcaaccgttgccaaccattagacgcatgcgcgttc

SEQ ID NO: 249 - DNA, 529 bp, Diabrotica virgifera
  misc_feature (1)..(529): RNAi target sequence
atttttgaggttgtcggctagaagttcgcaaagtaaatctaaattccaacaattaaaccgaaatagttctttaaaaaagatgtttcgaaaccaatacgatagtgatgtgacagtgtggagcccccagggccgtctgcatcaggtagaatatgccatggaagcagttaacctaggttcagccacagtgggactgaaaagtaaaactcatgctgtacttatcgctttgaagagggcttcttcagaactgtctgcctaccagaagaaaattatcaacatagacgatcacattggtatcaccatctcgggacttacagctgatgctaggatccttagtagatatatgcgaaacgaatgcttgaattataagtactctttggatacttatatgccattgaataggcttatcagtattttaggtaacaaaatgcagacatgtacccaaagatacgaccgcagaccatttggtgtaggtcttctagtagctggttatgacgaatctggttctcatatctaccaaacgtgcccttct

SEQ ID NO: 250 - DNA, 22 bp, Artificial Sequence
  primer
  misc_feature (1)..(22): forward primer
atttttgaggttgtcggctaga

SEQ ID NO: 251 - DNA, 22 bp, Artificial Sequence
  primer
  misc_feature (1)..(22): reverse primer
agaagggcacgtttggtagata

SEQ ID NO: 252 - DNA, 1051 bp, Diabrotica virgifera
  misc_feature (1)..(1051): WCRW transcript 454run3_isotig10716
cgatgttctgccgtgactgtctcggtctgctttagactaacagagacagccacggcaatattcctttccaataccccctctcctgatcaacgggtggctttaatgctttatctaatccttctattctgtggtatccatggcagaagtttccacagctgggactgcatccctgggctcgtcccccgcatcatctctcaacggatctgcaggaaggtcctcaattgcagcagctgcagctcctcctcctctacgttcttcaccctcaataagggacaagtagggggaagtttcttcttcttcgaggattttaaaggtctgacctttgccagtgtatcctatggagacattttttgttgtgaggtcaacctctggaggtagagtatctctaagagccctcaatccatgtttgataagttcttctaaagaactagatggcaattcatccagatgtttttctaagtatgtcctggcactctgggatcgagctccaatggacatagctttgcaatcgtagaaattagcagaagggcacgtttggtagatatgagaaccagattcgtcataaccagctactagaagacctacaccaaatggtctgcggtcgtatctttgggtacatgtctgcattttgttacctaaaatactgataagcctattcaatggcatataagtatccaaagagtacttataattcaagcattcgtttcgcatatatctactaaggatcctagcatcagctgtaagtcccgagatggtgataccaatgtgatcgtctatgttgataattttcttctggtaggcagacagttctgaagaagccctcttcaaagcgataagtacagcatgagttttacttttcagtcccactgtggctgaacctaggttaactgcttccatggcatattctacctgatgcagacggccctgggggctccacactgtcacatcactatcgtattggtttcgaaacatcttttttaaagaactatttcggtttaattgttggaatttagatttactttgcgaacttctagccgacaacctcaaaaat

SEQ ID NO: 253 - DNA, 533 bp, Diabrotica virgifera
  misc_feature (1)..(533): RNAi target sequence
aggcataacggtcaaagaggtagaggttattataataataatcgggattccaggtatggcgatagagactatcgaggcagaggcagaccgtacgggttccaaaatagaggtaatcgaagacaacagcgcggtagatatggttctagaggagggggaggatacagagattatagggatcgcagatattcaagaagcagatcccgcgaccgcgatcacagcaggtcatacagtcagagcaactcagacgcctctcctccatcgaaacgagacaggtcttctcctccatccgagaaagaaaagatcaacaagtattctgacggagacgcgcccatccagcatgaaggaccgctttctgagggcgaggacagggacgattacatcagcaccgataccagcaagttgatcgatagggaaatcggtggtaaatgggctgataaagaagctgacactagtaaggaggaagccaaagagagtgggcaagggaatactgtggaagtaaaggagtaaagaggtggactttcttttaagtcgtt

SEQ ID NO: 254 - DNA, 22 bp, Artificial Sequence
  primer
  misc_feature (1)..(22): forward primer
aggcataacggtcaaagaggta

SEQ ID NO: 255 - DNA, 24 bp, Artificial Sequence
  primer
  misc_feature (1)..(24): reverse primer
aacgacttaaaagaaagtccacct

SEQ ID NO: 256 - DNA, 3832 bp, Diabrotica virgifera
  misc_feature (1)..(3832): WCRW transcript ta01498.002_diavv
ggggaagataaaataatttcctggtaaatagcttgtcagtgattattaatttatcgtttttattaaaagtatctattttaatctagaatttctcattattaatacaatattttctaaataattgtcacttaaattacaatttttacagaaataaagtattgccgttgaaaaatatctacaaaaccactttggggggtgttcaaaatggacgtcattcttcatattcgctaattgccggtgaaaaatattgtctagagttaaaatggaaacagtaaattcacagttgttgaccaaagccataaactttcatggtcaacagctgcagaagttgtgggaaggagaatttggagaaaatgatttgacaagaaaaaatgtcaaagatttgaattacaatgtgtatagtcaacgccagaagaacctatcttttcaagatagaggtaaacggttgaaactccaacagtttttgataaagaaggctaattttatctatagtttggaacccacgaagcaaaagaacaatgagaaagcgattactgaagatatgtatgctgttatgcctccttttgaaacttacaccagtgtagacaaacaaaaaagagtggcattcttcatggagaatgtgaaagtaggtaatctaatcctgggcaccattgtgagcagacaacaatcaggaatgatgttgaaagtgttgtgtactactggaaatggtaacacttgtttatatgctgctgatatcaacgtcaaggcattctgtccagttgcaaatgtcattaatgcagtggacaaaaagggggtatcacgcaactacatgatgaatgactatgtgtgttgtgaagtgctggaaatcatgcctgatacagataagctaatatgtggtatgatgggtgtgactaggaaatcatcagatccagaacatcgaccacctctagggcttattagtactgaagattttcctcttatatacaaaaaagcgttggatcacaagagtgagagttacgacagtgttttagagaagagcaccgggttcaataaccccaataacattcaatacctctcagaacagatggatgttggtaaacatctcagcttcatcacaggcttaaagtacaggttcccggaaaacgaatatgccaccgagttgagacaagtccaggccagtaaatgggcttaccgcaatgtagcagacggcatagatcattttaaggcgggaaaacacgtggaagcgttccaatgtctcaacaaagccctcaatatagatcccaagaatgtcgaaggtctcgtagcgagaggtgcgctctatgctaacagtggaaatttccagaaggccatcgaagatttcgaaactgctttgaagctgaatcctaatcatggaaacgctcgaaaatatatgggagaaactctcgtcgcattaggaaggagctacgaggaagaaaataaattagaggaagctagaaaagcgtaccagagctgcttgactatcattccttaccacgaagaagctcagaactctttggatttcttaaaatccaaagttcaaccaaaaaatcttattgaacccactgaacttctactgccaagtttgaacgttccctctaagcaaactgacatgaatgacgcgcttaaacaacttctaaagaccgaggaagaagacaaaaaagataagaagaagaaaaagaagagcaagaagcgcaagagtcgaaaacgctccagttctagctcaagttcgagctcgtcggcaagtggagaatcctcctcgagctcgtctagcagctccagcgactcaagctctagctcgggcgattccgattttaaaaagcgcaagaagcacaggtcgaggtctcaccggcgtaaagaacgcgagaattcgctcagtcctttgagcaagaggatggctttgatggatcagagccatgacactcccaataccagttacaatttcaacaaaccagcaagttccagctttgagtttagctttgaacatccagagccttctaaaccacctgagaacgaatacgaaaataaattgagggccttcctggatcaaaccaagggcgactccgactatgaggacaaactgagaaaattcctggaagagacaaaatggaagaaaggcaaaggcgaggacaaaaagaagaagaaaaagaaagagaagaaggccaagaaagagagcaagaaaaagaagaagaaggaaaagatcaagagaaaacagagcttcgatttgagcgaattggacgaccacaagaagctaagggacgccattaagaaggaattgagcaaagaaaagaaatcgaagaggcacagtttggcgtctgaagacgacgagtacatcctgcagaagtcgggttatagtaagaacattaaagaacgaagcgcgagccctcccaagcgcattatagactccccgtctcccacaagggagcagaaggcgcgacaggcagtagccgaagctacggcctctgcgggggcccagaagtggaaaatgcaaattgccggcagttcgggcaattccaggttcaaaaagaagcccgaaagagcgcctcctgcttctgattggcagtctgatagagacaaacgagagcgggagcgagaacgcgatagagagagggaaagagagagagaacgtgctaagagctcttctgcctctgacgattctccaccaccgaaaaaaatgtctttgcctccacttcctccagctgagaaggccgttagtgtgcgcaaggccatggcattgaaagaaccgccactcaaaaagcctgagtctcccaaaaagttaaaactgactccagctccacccttgccgaaaataccgcagggacaagttgtgcttgataaatttggaaacttcaggctgatttctccgcctgaattgaaaaagggagaaggaacgagttcaggtcgccgcccaccggagcccccaggtcgcccgcgcagcgacagccgctcgccgaaacgccgcagtcgcagccgttccagatcgtcgagcggatcgcgatctcgctcgcggtctcgctctcgaagctaccgctcgcgatcgcgcagctactacagcaggtcgcgatcgcgcagcggctcctactactcacgcagtcgcagccgctcgcgcagttactccggagaccggcgcaggtacaaccgcagaggcggcttcagaggcaggcatctcaacgacaggggcacgtactacaaaccgaggttccaaacgccaaggcataacggtcaaagaggtagaggttattataataataatcgggattccaggtatggcgatagagactatcgaggcagaggcagaccgtacgggttccaaaatagaggtaatcgaagacaacagcgcggtagatatggttctagaggagggggaggatacagagattatagggatcgcagatattcaagaagcagatcccgcgaccgcgatcacagcaggtcatacagtcagagcaactcagacgcctctcctccatcgaaacgagacaggtcttctcctccatccgagaaagaaaagatcaacaagtattctgacggagacgcgcccatccagcatgaaggaccgctttctgagggcgaggacagggacgattacatcagcaccgataccagcaagttgatcgatagggaaatcggtggtaaatgggctgataaagaagctgacactagtaaggaggaagccaaagagagtgggcaagggaatactgtggaagtaaaggagtaaagaggtggactttcttttaagtcgttaaagaagatttgttttaagtgtttgctatgtaatataattttttcataatatagaaataaaggttaattgtacacgaaaaaaaaaaaaaaaaaa

SEQ ID NO: 257 - DNA, 583 bp, Diabrotica virgifera
  misc_feature (1)..(583): RNAi target sequence
tgggccagttaagttcgtattccacaacaaaagaatggacccgtggaagaaaagcacttttgggaagcttagggcttattgctggtggtactggtgccttgctgtttgctttggaccaatcagttaaagcatctgatcttgaattgcatcctccaaagaatgtttggagtcattctggaactttcaattccttggatcatgctagtgtaagaagaggttatgaagtatacaaacaagtatgtgctgcctgccactcaatgcgcttcattgcttaccgtaacttaattggagtttcccacactgaagcagaagccaaagctgaagctgaagaacaaatgattgaagatggtcccgatgacacgggtaactttttcaaaagaccaggaaagttatctgactacttccccagtccataccccaatgaagaagcagctcgtgctgccaacaatggttcctaccctccagatttgagctatattgtatctgccagacatggaggcgaagattacatatttgcccttttgacgggttactgcgacgcgccagcgggcgtggtcctcagagacggacaatacttcaaccc

SEQ ID NO: 258 - DNA, 22 bp, Artificial Sequence
  primer
  misc_feature (1)..(22): forward primer
tgggccagttaagttcgtattc

SEQ ID NO: 259 - DNA, 22 bp, Artificial Sequence
  primer
  misc_feature (1)..(22): reverse primer
gggttgaagtattgtccgtctc

SEQ ID NO: 260 - DNA, 1332 bp, Diabrotica virgifera
  misc_feature (1)..(1332): WCRW transcript ta01835.001_diavv
ggggggtacgtgctaggtgcagactggtattacgtaaagtgtcaaaaaattgtatattttttcttagtagcttcctaaaagtgcttaaattctatcaaactagctttctatcacctaaatacttcatgttactctaatctaagggtacgaggggtacaaaataaatttcacataacctatctgcatagtttttgaggggaccctttaggcaacatggctgcaacaataggacgaatttgtggagctggtcttttaaaaccaacaaacttatcctctgtgggccagttaagttcgtattccacaacaaaagaatggacccgtggaagaaaagcacttttgggaagcttagggcttattgctggtggtactggtgccttgctgtttgctttggaccaatcagttaaagcatctgatcttgaattgcatcctccaaagaatgtttggagtcattctggaactttcaattccttggatcatgctagtgtaagaagaggttatgaagtatacaaacaagtgtgtgctgcctgccactcaatgcgcttcattgcttaccgtaacttaattggagtttcccacactgaagcagaagccaaagctgaagctgaagaacaaatgattgaagatggtcccgatgacacgggtaactttttcaaaagaccaggaaagttatctgactacttccccagtccataccccaatgaagaagcagctcgtgctgccaacaatggttcctaccctccagatttgagctatattgtatctgccagacatggaggcgaagattacatatttgcccttttgacgggttactgcgacgcgccagcgggcgtggtcctcagagacggacaatacttcaacccctatttccccggtggtgccatttcgatggcacaagccctatataatgaaaccatagaatacagtgacggaacaccagcaactgccagtcaactcgccaaagacgtcgctgtgttcctaaaatggacgtcagagccagagcatgatgacagaaagaaaatgttaatcaaagtgatcggcatcttttctcttcttattggtatcacttactatgctaagaaactcaaattctcttcactgaaatcgagaaagattgaatttaggcccaagagtaaataaataagtattgtagatgaattttaaacaaggtttagcgtgactaccatagttattattatcttaaggtctaattttattgtacatatttacagactttccaactgactggggtttgcatttgccaccttggtttatttattttttccaggctttattattattgtgtcacgttatgtttcaataaaaaaaaataat

SEQ ID NO: 261 - DNA, 546 bp, Diabrotica virgifera
  misc_feature (1)..(546): RNAi target sequence
gatcccctgcacttggattatgttattgctgcagctaatttgaaggctgaagtttatggtataccaactagtagaaatagagaacaaatcgcagaagtggttatgcaagtcaatgttccagaattcatccctaaatctggcgtaaagatagcagttacggattctcaaatggctatgaatggtaataatgtggatttggatcgtgtttcccaaattaaagaagaattaccctcagtagcagaactaggtggactacgtcttactcctttagaatttgaaaaggacgatgacaccaatttccacatggactttatagttgctgcttcaaatcttcgtgcagctaattacaaaataccgcctgctgatagacataaatcaaaacttattgctggtaagattattcccgccatagcaacaacaacctcagtagttgctggaatggtttgcttggaactctacaaactcaccagaagctatacatccctaactccattcaaaaataatttcattaacctcgctctgcctttcttcagttgctcagaacca

SEQ ID NO: 262 - DNA, 21 bp, Artificial Sequence
  primer
  misc_feature (1)..(21): forward primer
gatcccctgcacttggattat

SEQ ID NO: 263 - DNA, 22 bp, Artificial Sequence
  primer
  misc_feature (1)..(22): reverse primer
tggttctgagcaactgaagaaa

SEQ ID NO: 264 - DNA, 4199 bp, Diabrotica virgifera
  misc_feature (1)..(4199): WCRW transcript ta05794.001_diavv
tgagaacttgcgtggttcatttctttcctttgtcccatcattctgattcattttcagcttaatttttccatgtagtgccggttaattgaagtgatatatgatttatttatgtgattacatctaacagcagactcataaaattgtgtctttttgtgtccgatgtctagtggtagtttagcagacaactccatcgatcctccagccaaaaagcggaagcttgaatcaaagattgctaccctcgaaatggcgaacaatgaagcttcaggatcctccaccagtgatattgatgagggactttactcgagacaactgtacgttttggggcacgaagctatgcgccgcatggcaaatagtgatgttctaatatcaggtttaggtggtttgggtgtagaagtagctaaaaatgtaattcttggtggtgttaaatctgttacccttcacgatgaggctctttgtactattaaggacctgtcatcccaattttatttaacagagggggacattggtaaaaaccgcgcagaagcctgctgtaagcagttatctgaactcaacacttatgtccccacaaagtcttacacagggccccttgatgaagctttcatcttaaagttcagtgctgttgtcttaaccacaagcaatcgtgaagagcaactaagaatcagtgagataacacacgaaaacaacattgcattaattatagcagacacgaaaggcctttttgcacaagtattttgtgatttcggaaaatcctttactgttgtagatgtaaacggagaacctttagtctctgcgatgatagcagacatttcgaatgatgtcgaaagtgtagtcacttgcattgacgatacaaggcatggtatggaggatggagactatgttaccttctcggaagttcagggaatgactgaattaaataactgtgaaccaatcaaaatcaaagtattaggaccatacacctttagtattggcgataccaccaagttttctaaatacaccagaggtggtattgtaagtcaagttaaaatgccgaaacatctggaattcaaatcgtttaaagattctcttgaaaatcctgagataccaattactgattattcaaaaatggattttcctacgcagcttcatctagcttttaccaccttacataagtttgtagaaaagtctgcaaggctacctaaaccatggaacaatgaagatgcaacagaatttgttaatttagctaaatcgttagctgcaaagggtgattctgaaggagaagttaatgtagaccttttagacacatttgccaaggtatcggctggagatttaaatcctataaatgctactattggtggtattgtagcccaagaagtaatgaaggcatgttctggaaaattccatcccattttccaatggttctactatgatgccatagaatgcctaccacaagataaatcagaaatcactgaagaactagctgcacccactggtagcagatatgatggccaagttgctgtttttggaaaagaattccaaaagaagttagcatcactgaaatattttattgttggtgctggagctattggttgtgaattgttgaagaactttgctatgatgggtgtaggaacacaaggagaagttacagtaactgatatggatttaattgaaaaatctaatttgaacaggcagttccttttcagaccacataacgtccaacaaccaaaatctgccacagctgcaaaggtcattaaaaagatgaatcctgatatcaatgttgttgcacatgaaaatcgtgttggacctgaaactgaaagtgtctacaatgacgatttctttgaaaagcttgatggagttgctaatgcactggataacgtagatgctagaatttatatggatagaagatgtgtctactaccgcaagcctcttctagagtctggaaccctaggaactaagggaaatactcaagtggtggcacctttcctctctgaatcatacagttcttctcaagatcctccagagaaaagcattccaatctgtactttaaagaatttccctaatgctatcgaacatactctacaatgggcaagagatatgtttgaaggattgtttaaacaaaatgccgaaaatgcttcgttgtacataacagaccctgatttcctcgataggactgttaagctacctggtgtacaacctttagaggtattggaatccgtaaaggctgccttaattgatgagagacctaaagatttaaatgattgcatcgcttgggcacgtaaccattggcaagaacagtattccaaccaaattaggcagttgttgttcaactttcctcctgatcaattaaccagtacggggcagttgttctggtcgggaccgaagagatgcccagaagcgcttacttttgacgtaaacgatcccctgcacttggattatgttattgctgcagctaatttgaaggctgaagtttatggtataccaactagtagaaatagagaacaaatcgcagaagtggttatgcaagtcaatgttccagaattcatccctaaatctggcgtaaagatagcagttacggattctcaaatggctatgaatggtaataatgtggatttggatcgtgtttcccaaattaaagaagaattaccctcagtagcagaactaggtggactacgtcttactcctttagaatttgaaaaggacgatgacaccaatttccacatggactttatagttgctgcttcaaatcttcgtgcagctaattacaaaataccgcctgctgatagacataaatcaaaacttattgctggtaagattattcccgccatagcaacaacaacctcagtagttgctggaatggtttgcttggaactctacaaactcaccagaagctatacatccctaactccattcaaaaataatttcattaacctcgctctgcctttcttcagttgctcagaaccaatcgcagcccaacaaatggaatactgtggtaacaaatggacactctgggaccgcttcgacgttcagggagagatgacacttagtgaatttttggaatacttcaaggaaaaacacggtcttgaaattacgatgttgtcccagggcgtctgcatgctgtattcgttcttcatggcaaaagctaaagctcaagaacgtttcggtctttcgatgtcagaagtcgtcagacgggtgtcaaagaagaaaatcgaacctcacgtaaaagcattggtattcgaactgtgttgcaacgattccactggtgaagacgtggaagttccatatgttaaatacaatttatgttgagccgactcagttcaaaactcaacttaaaagacttaagagttttgttaggtcagtttctggattaagagtacgggaaaactagccacgttttactatttacacattgtgagattgctgaccaatagttggaatacatattagcagcaagagcttgtgtcttttattatttattatttatcagctgttttttaatatttgcagacctttaaatattttttataacttttaaatgtcctttttgtattaacgtcatggcaaccactgttagtatttaacccttccagctccgctgtaatatgtccagcatcatgacgcacttacgcgtcaaatacactggccaagtcatctttggacgcgcgtatgcgtcaccgtagctgaaagagttaaatctctgtaatttctccaattttcgtttacccaaaaactgatctatactgaatttgggtacttgactggaaagtgtgatctaaattattcttctcaaagaaattgtttgctgtcattttgagataggttaatgaaattaataacggaaaggattagcatttaaacacgttgatgcaatatacttataataacttgtaggagtatgtttatttttatgaaaatagtagttttcaggtaacagttattattttcttaagaaattttcatgtgtgagaataaaataaatatttacaaaaagttccttgttttccttatatacctacaatcgtcgacgactgtagctcaacaacaatatactaagtcgattctatgctccaacaacattttcatttttaaaaatgataaaacaccaaaagtacacatttgttctcatcttactaaggcacgtcgaataatatatcgcttatactatttcagtgacttaaaacgtaagaacagtaaacgtaacagtaagaaattttcatgtgtgagaa

SEQ ID NO: 265 - DNA, 644 bp, Diabrotica virgifera
  misc_feature (1)..(644): RNAi target sequence
gaatttgatttggcattttggtatgtagaaataaaattatcttgtcaataaataatcagaaatattgaaagtagaatcgttctaaataattagaaattgaaagtagaacagtttgttcgttttactaggtagtaaagagttaaatagacaacaggacgctgttaaaaggtaagctattgccgccatacttttcctgactgaatttattaattttttgtttacctaaaaacattattgtttttaaacacattttgtttttgataacatatttaatctaatactagaaaagccaaaaattacaaaataaggtaaagaatctaaatggtttattactattagggcccccaggcattaggcagtctatgtacatgtaacagccagagccaattcgtgggcaagttgtatccttcaagggatgtagaagtgcaagaggtcataattatttactatttctctcgtagaaaactcaacatataagcatcgaattcaaattcagcctcttcttttataacatcacttgaaaggcatttcaattatattttggaagcatgtttgtaggttcccagatatacaaaaatgtcagttcaatcgtttgataatcttctgtataaattaattcaatcaaggccactgatactcctatg

SEQ ID NO: 266 - DNA, 22 bp, Artificial Sequence
  primer
  misc_feature (1)..(22): forward primer
gaatttgatttggcattttggt

SEQ ID NO: 267 - DNA, 22 bp, Artificial Sequence
  primer
  misc_feature (1)..(22): reverse primer
cataggagtatcagtggccttg

SEQ ID NO: 268 - DNA, 712 bp, Diabrotica virgifera
  misc_feature (1)..(712): WCRW transcript ta41459.001_diavv
tcagccagatctatccccaatgtttttaaaatgatttttgatactgaaaaattaaaattaattcacataggagtatcagtggccttgattgaattaatttatacagaagattatcaaacgattgaactgacatttttgtatatctgggaacctacaaacatgcttccaaaatataattgaaatgcctttcaagtgatgttataaaagaagaggctgaatttgaattcgatgcttatatgttgagttttctacgagagaaatagtaaataattatgacctcttgcacttctacatcccttgaaggatacaacttgcccacgaattggctctggctgttacatgtacatagactgcctaatgcctgggggccctaatagtaataaaccatttagattctttaccttattttgtaatttttggcttttctagtattagattaaatatgttatcaaaaacaaaatgtgtttaaaaacaataatgtttttaggtaaacaaaaaattaataaattcagtcaggaaaagtatggcggcaatagcttaccttttaacagcgtcctgttgtctatttaactctttactacctagtaaaacgaacaaactgttctactttcaatttctaattatttagaacgattctactttcaatatttctgattatttattgacaagataattttatttctacataccaaaatgccaaatcaaattcccc

SEQ ID NO: 269 - DNA, 629 bp, Diabrotica virgifera
  misc_feature (1)..(629): RNAi target sequence
  misc_feature (568)..(568): n can be any nucleotide
  misc_feature (594)..(594): n can be any nucleotide
tgagaaaaactgtcctttgcatttgcagcgttaaagatcggtctcagtaataaaattatttgtagagtttgcaatttcctgaaaatagtgacctctgataaagttcacaacagttcaataattggtagtggcgcatatcagtgtctttgacgaagccatgattaatatagctggtggtgcagtgatttcttcgtttgcggtgtatttgttattaagatacaggactagaatgacgtcccttttgacatggattattggaaatattagatctcaacaagctgtcagcagtacatcacaagaagaagagaaatctgacaaatccagcagcaataaacccaagcaacagtttaaaggtggcaaagttcgacagaggcctaaaaaacttaacgaagatcccacatttagtacaagtttatcaacccccattgaagatataatagaggaaacaatcaatgaagaagcagtagcagttaataagaaaaaaggaaaatcatccaaaaagcaaactgaagaattgccagtgaaaaaggaaaaacccacaaaagatctagatgatgacataggttantcatttttcaaagttaaaactgtttnccaaaggaaatccagaagccaagcctaagaaacaa

SEQ ID NO: 270 - DNA, 22 bp, Artificial Sequence
  primer
  misc_feature (1)..(22): forward primer
tgagaaaaactgtcctttgcat

SEQ ID NO: 271 - DNA, 22 bp, Artificial Sequence
  primer
  misc_feature (1)..(22): reverse primer
ttgtttcttaggcttggcttct

SEQ ID NO: 272 - DNA, 1750 bp, Diabrotica virgifera
  misc_feature (1)..(1750): WCRW transcript ta03339.001_diavv
  misc_feature (633)..(633): n can be any nucleotide
aaaagtagcgaaggtacaacgtgtagagaatagtcagtctgagaaaaactgtcctttgcatttgcagcgttaaagatcggtctcagtaataaaattatttgtagagtttgcaatttcctgaaaatagtgacctctgataaagttcacaacagttcaataattggtagtggcgcatatcagtgtctttgacgaagccatgattaatatagctggtggtgcagtgatttcttcgtttgcggtgtatttgttattaagatacaggactagaatgacgtcccttttgacatggattattggaaatattagatctcaacaagctgtcagcagtacatcacaagaagaagagaaatctgacaaatccagcagcaataaacccaagcaacagtttaaaggtggcaaagttcgacagaggcctaaaaaacttaacgaagatcccacatttagtacaagtttatcaacccccattgaagatataatagaggaaacaatcaatgaagaagcagtagcagttaataagaaaaaaggaaaatcatccaaaaagcaaactgaagaattgccagtgaaaaaggaaaaacccacaaaagatctagatgatgacataggttattcatttttcaaagttaaaactgtttnccaaaggaaatccagaagccaagcctaagaaacaagtttctgttgacctaaatgaagataacacagcagatgatataggtttctcatttttacctgtcaaagaaaaaggcaaaaaatataaatctaagagtaatccagaaaataaagaccaagaactgactttaaacgcagtggtagatcagacactgaggaaagctaaatatgatacatcaaagccgtcaagaatagaacattacaaaaagagaacaactgacaaagctttttccaaaaaaggctgcaacaaaatttgaaagtccttcagtatctacaatcgtagaaaagagattgttgtatgaaagcaaacttaaaagtgaaactaaggagagcaaaaaagttacatcttctatttcctttgctagcatagtcagtaatgctactgacgccccttcaggttctgatattgaacaaaattcccagttactaaatggacctaagcctgatattcaacagcatatctttgagtctttagagtcagtaaaatctagtgctgagtccgtagaagtaattgatgatagcaattctgaatatcaaaacagtcaatccaccaattttgagacaatcaaagaaaaattaaatactttactcgatgaggattctgattttaatcaaactcaaatagagcaatcaaatgtatatgaaatagatcaatcttcaaagcattcttctgtatatattgtaggaagtaacgaggtattggaagaatcatcctccacacaagattcttatattggtcatacaggttttgaacaagaacctgaacaaacattcagtcagaaaactctagaagcttctatagacaacagatttataacagatgccagtatattagaaaaaagtacatccactgaagcttttcttagttttgaaagacatatcgaatcacaagatctaacacacagtcttgaatccagtaattattatcaaaataattattcacagttaaattttgacaatcaacttcaaaactcttcagaaagccatatttctgattacagctattcccaaaatcaacagtccctaagctcaagcgacttttctagagactacaattctacagaccattcctttacagaactag

SEQ ID NO: 273 - DNA, 700 bp, Diabrotica virgifera
  misc_feature (1)..(700): RNAi target sequence
  misc_feature (608)..(608): n can be any nucleotide
gagagcacttttcgcagttaccacagcggaccggcttttcaacaaacagaaacaatcagaggaccggtgtaaaagtgatggatccttcatttgagaatgctgggcaagtggatggccttgaaatatggagaattgaagacttcaaacctgtgccttatcctaaaaatcaatacggcaaattctacacaggagactcatacattatactaaataccaaaactacaagaagtggtgccaaagtacatgatcttcatttttggttaggtgctgaaactagccaggatgaacaaggatcagctgccatatatacagttcagttggacgagcatttgaacggagaaccagtccaacatcgtgaaacccaaaaccacgaatctcaactgttcttatcttacttcaaaagcggtggtattcgataccttcctggtggtgttagctctggcttccaccatgtcgatcctaatgctttcgagaagaggctgttccaagttaaaggctctagaaatattagagttaagcaagttaccccatcaatcgcctctatgaacactggtgactgctttattttggacgttggaagagatatttatgtctatgttggtactaanggctagaagagttgaacaactcaagggctattaatgctgccaaccaaattcgcgaccaagatcatgccggaaaggccagagtaaccattgtc

SEQ ID NO: 274 - DNA, 22 bp, Artificial Sequence
  primer
  misc_feature (1)..(22): forward primer
gagagcacttttcgcagttacc

SEQ ID NO: 275 - DNA, 22 bp, Artificial Sequence
  primer
  misc_feature (1)..(22): reverse primer
gacaatggttactctggccttt

SEQ ID NO: 276 - DNA, 2169 bp, Diabrotica virgifera
  misc_feature (1)..(2169): WCRW transcript ta00090.001_diavv
gggggactagctgtatgagctttcgtaacgttcggttgtgtgacagttcagtgtggaagtgataattcaaaaaaaaacgcaggcgacaaaaacaaaataggaactacataatagagagagaccgaggcgaataagatggaccacccttaaaccacccaaattagaacattaaaaggtgtttttcaaagctctcaaattcaatagctagcgcatgtccaaaatgtggggaaacggagcgtttagtcgcggcactttggtgtgtctcgcgcttttagtttatctgaaagatagtagctgtgtgactacaaacagacgagagcacttttcgcagttaccacagcggaccggcttttcaacaaacagaaacaatcagaggaccggtgtaaaagtgatggatccttcatttgagaatgctgggcaagtggatggccttgaaatatggagaattgaagacttcaaacctgtgccttatcctaaaaatcaatacggcaaattctacacaggagactcatacattatactaaataccaaaactacaagaagtggtgccaaagtacatgatcttcatttttggttaggtgctgaaactagccaggatgaacaaggatcagctgccatatatacagttcagttggacgagcatttgaacggagaaccagtccaacatcgtgaaacccaaaaccacgaatctcaactgttcttatcttacttcaaaagcggtggtattcgataccttcctggtggtgttagctctggcttccaccatgtcgatcctaatgctttcgagaagaggctgttccaagttaaaggctctagaaatattagagttaagcaagttaccccatcaatcgcctctatgaacactggtgactgctttattttggacgttggaagagatatttatgtctatgttggtactaaggctagaagagttgaacaactcaaggctattaatgctgccaaccaaattcgcgaccaagatcatgccggaaaggccaaagtaaccattgtcgatacctacagtccagaaagtgactatactacattctttgaagccttgggtgaaggttccagagactcagttcctgactataccaccagtgacgacgatgaatctttcgaacgcacagaggaaaatcatgcttcactttacaaggtatcagatgctactggctctgttaaagtaaccaaagttggacaaaaacctttggaagctagttcattggaccccagcgactgctttattttggataccactgatgccttattgtatgtatggatcggcagcaaatgtgatgaaagagaaaagaaggaagcgatgaataaagctgatgggttccttaatgcgcacaatcaccctaaatggacacatgttcaaagaattgttcaaggagctgagcctactgcgtttacacaatatttcagaaattggcaggcctttggagaaacccacccaagattactacgttctgtcagcacctcagcccacctttaccattgccaaatccgttcaagatctcgcagacttaaagtcgaagagattagggactatgagcaggaagacctctgggaggatgacatcatggtcttggacgctggtgatgttgtgtttgtttggaacggcaaaggagcttcagatgaagaaaaatctagaggacctaaatacgtacataaaatgttgaatcgtcaaggtcgtgaagacgtaccagtaaaaataatcgagcaaggtgatgaaccagaagaattcacaatacacttcccagcttggtcagcagatcactgggacaatttaccagatgtaagaagctacatcaaaaatgaggaagactgaattctgttatcatgattgaccaacgcgtcacttgttttaaataaggcttttaagttgaaaaatgtgcgcaaaaatattatagctttaacatttttaaatatgcatttatatagctgttttagttttttatatgccaatgctctcggttaaatagaaatagtttcaaaattattgttacaacactagaaagaacttatgaattgtgcctaaaaaagatttttaaatactatatttaaatgatactttatatatgtactgttgtgtacctatcagtgttattttttaaaatgtatttgttaagcttgtgtggttacaaaaactataataaaaatattaat

SEQ ID NO: 277 - DNA, 608 bp, Diabrotica virgifera
  misc_feature (1)..(608): RNAi target sequence
  misc_feature (561)..(561): n can be any nucleotide
  misc_feature (562)..(562): n can be any nucleotide
caacctggaactttaactgctgcagctgcaacaccaggtaaaggtaagaagaaggaagaaaagaaacaagagaagaagccacaaacacctaaagaaaagaaggaaaaggaacagccagaagaattagatgctgcagaagccgctcttgctgaagaacccaagagtaaggaccctttttctgaactacctaaaggaacctttgttatggatgactttaaacgtgtctattcaaatgaagaagagagcaaatcaattgcttatttctgggaaaaattcgaccctgaaaactattcaatctggtatggtgaatacaaataccctgaagagctctccaaagtgttcatgagctgtaacctaattactggcatgcaacagagactagataagatgagaaagcaggcctttgcatctgtatgcctttttggagaagacaacaacagcacaatctccggtatctgggtatggagaggacaagaattagcttttaccttaagtcccgactggcaaatagattatgaatcctatgaatggaagaagttagatgccaaatcagaagaaacnngaaattagtagagcaatacttctcatggacaggtactgacaagcaa

SEQ ID NO: 278 - DNA, 22 bp, Artificial Sequence
  primer
  misc_feature (1)..(22): forward primer
caacctggaactttaactgctg

SEQ ID NO: 279 - DNA, 22 bp, Artificial Sequence
  primer
  misc_feature (1)..(22): reverse primer
ttgcttgtcagtacctgtccat

SEQ ID NO: 280 - DNA, 1508 bp, Diabrotica virgifera
  misc_feature (1)..(1508): WCRW transcript ta20625.001_diavv
ggggctctttagctagttttgagtgtagtgagaatggctgccggaactctttacacttatcccgaaaatttccgggccgcaaaaactctgattgccgcacaatatgccaaggcaaacgtcaaagtagcacccaattttgtttttggagaaactaataaaactaaagagttcaccaagaaatttccaagtggaaaggttcctgcttttgaatcaaacgatggcaagtaccttcaagacagcaacgccatcgcttactatgtttccaatgaacaactaagaggaaaaaacgaatatgatagagcacaaattttgcaatggattggctttgctgaaggtgaaattgttccagcagcatgtgcctgggtattccctatcttgggaattgttaaaaataacagtggtaatgatgagactttccaaagagcaaaggaagaccttaaatcctctttgtctattctcaacagccacttacttgcccacacttacttggtaggagagagaatcactctagctgacattgtagttgcctgcaacctattgaatgcctacaaatatgtacttgatcccaactttagaaaatcttttggtaacgtcaatagatggttcaatacacttattaaccagccacaattcatagctgtacttggagaagttaaactttgcagtgcagttgctcaacctggaactttaactgctgcagctgcaacaccaggtaaaggtaagaagaaggaagaaaagaaacaagagaagaagccacaaacacctaaagaaaagaaggaaaaggaacagccagaagaattagatgctgcagaagccgctcttgctgaagaacccaagagtaaggaccctttttctgaactacctaaaggaacctttgttatggatgactttaaacgtgtctattcaaatgaagaagagagcaaatcaattgcttatttctgggaaaaattcgaccctgaaaactattcaatctggtatggtgaatacaaataccctgaagagctctccaaagtgttcatgagctgtaacctaattactggcatgcaacagagactagataagatgagaaagcaggcctttgcatctgtatgcctttttggagaagacaacaacagcacaatctccggtatctgggtatggagaggacaagaattagcttttaccttaagtcccgactggcaaatagattatgaatcctatgaatggaagaagttagatgccaaatcagaagaaacaaagaaattagtagagcaatacttctcatggacaggtactgacaaacaaggtagaaaattcaatcaaggaaaaatctttaaatgatctacatctatttaataaatcttacaaaatgctgtactgatcatgtgaagcaagagaaataaatcccaatgttttgttaataatatttttttattaatatgtaattgttttgatcgaagcttattctttgggctttactccctgagtttataagacacttaaataaatttaataacaatttaaaaaaa

SEQ ID NO: 281 - DNA, 724 bp, Diabrotica virgifera
  misc_feature (1)..(724): RNAi target sequence
gtcagtgtcatcatttgacgtgtcaagtttggggttaaattttgttaatttcaagaattaaaatatttaacataaaaatggtttctatattaaattcaatagatactggtcatgaagatatgatacatgatgcagaagtagattattacggtttaaggttagccacttgttcctcagataacagcatcaaagtttatgatataaaaagtggagcttccacactactggatgatctaaaaggccactatggacctgtttggcaaatagcttggagtcatcctaagtttggcaacttattagcttcgtgttcttatgataggaaagtaataatttggaaagaacagcaaagaaaatggataaaatattatgagtatgcaaatcatgattccagtgttaactctgttcagtttgcacctgctgagctaggtttaattctggcttgtggaagtagcgatggttcaatttctcttttaacttataatgttggaagtaatatttgggatgccaagaagattcaaaatgcccatgcaataggatgtaatgctgtaagttgggctccagccataacccctgtttttggagatgagactacacctgtgaaacgtcttgtttctggaggatgtgacaatttagtaaaaatatggagggaagatggtgacaggtggattgaagagtccaaacttgaagtacgctctgattgggtaagagatgtagcttgggctcc

SEQ ID NO: 282 - DNA, 22 bp, Artificial Sequence
  primer
  misc_feature (1)..(22): forward primer
gtcagtgtcatcatttgacgtg

SEQ ID NO: 283 - DNA, 21 bp, Artificial Sequence
  primer
  misc_feature (1)..(21): reverse primer
gagcccaagctacatctctta

SEQ ID NO: 284 - DNA, 1151 bp, Diabrotica virgifera
  misc_feature (1)..(1151): WCRW transcript ta06970.001_diavv
gggggacagttgtcggcggcccgcagccaaaatccatgttacgccgagacgttcgtatttgacgtgtcaagtttggggttaaattttgttaatttcaagaattaaaatatttaacataaaaatggtttctatattaaattcaatagatactggtcatgaagatatgatacatgatgcagaagtagattattacggtttaaggttagccacttgttcctcagataacagcatcaaagtttatgatataaaaagtggagcttccacactactggatgatctaaaaggccactatggacctgtttggcaaatagcttggagtcatcctaagtttggcaacttattagcttcgtgttcttatgataggaaagtaataatttggaaagaacagcaaagaaaatggataaaatattatgagtatgcaaatcatgattccagtgttaactctgttcagtttgcacctgctgagctaggtttaattctggcttgtggaagtagcgatggttcaatttctcttttaacttataatgttggaagtaatatttgggatgccaagaagattcaaaatgcccatgcaataggatgtaatgctgtaagttgggctccagccataacccctgtttttggagatgagactacacctgtgaaacgtcttgtttctggaggatgtgacaatttagtaaaaatatggagggaagatggtgacaggtggattgaagagtccaaacttgaagtacactctgattgggtaagagatgtagcttgggctccatcagtaggactccacagatataccattgccagctgttctcaagacaggagagttgttatatggactagcaatgattgcatcaattggaattcaacagtcttacatacatttgatgatgtagtttggaatcttagttggtctttgaatggaaatattttagctgtatctggtggagataataaaattaccttgtgggatcaaaactcagaaggtagttggcaatgcattagtgatattgccaagggccaaggtcaaatcaataatcaatgaattcgctatttaaatagatttcgaaagtgttatattttgcattttcttctgtattaagttttaatgaatgtatattttactactctaattttaaaattaaattaataaaaat

SEQ ID NO: 285 - DNA, 501 bp, Diabrotica virgifera
  misc_feature (1)..(501): RNAi target sequence
tgtccaataatgtgtgttgtgaagtgtaacaaatatgaaaaagactacacttagaatatgagttaaaattggttgaagattcctttgtatttagtttgtagttacacaacagtacagacatggcaagggagcaggtaaccagaaaatgggaaatatttcaaggtagaaataggttttactgcaatggaaggctgatgacagcaccgcattctggggtatttttgttgacacttttttttaattactgtaacgagtgtgttattttttgtatttgactgtaaatatttagcagaaaatgtgacaatagccattccgatcatcggagctttgctgttcttatttacagtgtcttcccttttgcgtacaagcttgtctgacccaggtattatacctagggcgtcgtcagaagaggcagcctacgttgaaaagcaaatagaagtaacaaactctgccaacagtcctacatatagaccgccacccaggacgaaagaagttttggtt

SEQ ID NO: 286 - DNA, 23 bp, Artificial Sequence
  primer
  misc_feature (1)..(23): forward primer
tgtccaataatgtgtgttgtgaa

SEQ ID NO: 287 - DNA, 22 bp, Artificial Sequence
  primer
  misc_feature (1)..(22): reverse primer
aaccaaaacttctttcgtcctg

SEQ ID NO: 288 - DNA, 2197 bp, Diabrotica virgifera
  misc_feature (1)..(2197): WCRW transcript ta06058.001_diavv
gggggtcaaagtcaactgtcaaaattgttgagtcgtgaatgtcggataatcttcactttttaggagtgtttcttgtttatttgtaaaaaacgataatatgcgtatctctaaacaagatgatatattaaattctgtccaataatgtgtgttgtgaagtgtaacaaatatgaaaaagactacacttagaatatgagttaaaattggttgaagattcctttgtatttagtttgtagttacacaacagtacagacatggcaagggagcaggtaaccagaaaatgggaaatatttcaaggtagaaataggttttactgcaatggaaggctaatgacagcaccgcattctggggtatttttgttgacactttttttaattactgtaacgagtgtgttattttttgtatttgactgtaaatatttagcagaaaatgtgacaatagccattccgatcatcggagctttgctgttcttatttacagtgtcttcccttttgcgtacaagcttgtctgacccaggtattatacctagggcgtcgtcagaagaggcagcctacgttgaaaagcaaatagaagtaacaaactctgccaacagtcctacatatagaccgccacccaggacgaaagaagttttggttaaaggtcaaaccattaaacttaagtattgcttcacttgtaaaatatttaggccgcctagagcttcgcattgtagtttatgtgataattgtgtagataggtttgatcatcactgtccatgggtggggaactgtgttggtagaagaaattataggtttttttacatgtttatagtatcactggcgtttttagcagtatttatatttgcctgtgcagttgcgcatcttattttaatgacgaaggaagatcgagaattcctagatgccgtgaaggaatcccctcccagcgtgctagttgcagtcatttgtttttttagtgtttggagtattttgggcttggccggattccatacgtaccttacggctagcaaccaaaccactaatgaagatataaaaggatcttttacaagcaaaagaggccaagaaaacgtcaacccttattcggagggcaacgtctgcttaaattgttttcacattctctgtggaccggttactccttcgttaatcgacagaagaggtgttgtcacagaaagctaccaatacgaaaacagtagacctgttaccaatgcaccaactttgcctttgaagaaatatggattgcccttgcagaatggtccccaacaagtgacacctgacgcagcggaaatgccaggcatctaccgccaaaccaccgagaacacggaaagcaacacgggtagcgtaacccacttagtgtctagcgaacagcccctagccgtcgttcccgccgcagtgcatctacagagaacccacggggacttgcaacagtaccagtcgcagaccagtctgaaccactccccggtctacaacaacatcaccccaacgcacgccgctcccgcgcaactcagcaaatcacaaagctgtatcgacaatataaattccacgtcttcatcgaaagaaaacggcgcgaaagacattacattgaacatggaagacctccatttggatcctgtgatattgagggagaaccacgtactggtcaacatcaacgacaaaggacggctcgccgatttgaggctagacaacgatatgacagtgcaagacaaggagaacagtttgttgagtgttagtaggttgcgactgttgcaagacacgacgatgatcgagagtgctttagacttggattcgttagatgggtctagtttaggtacgaatagtcaggcgggattgatgaaagtagacgtgtagttcattcgagaacttttagaagagaatgtttgtcatttgtttggcaacagccaacatatagtagtattgaatacagaagaacgtaaaataactcatgatagtgcaataaaatgggatttctttgttttcgacttattttattggtcaaaagttttgtttatatttttataacagaataaatatgattaaataattgatttgcactttaaaatgtataaaaatcatcagcagatttatctgtagcaatgcaagacacttttatagtaatctccagctagggaaaacttacgcagtgcatcttagtatttcagaattaaattttaaatgaaaaagacctttataaaagatatatttattttaaa

SEQ ID NO: 289 - DNA, 628 bp, Diabrotica virgifera
  misc_feature (1)..(628): RNAi target sequence
aatttgtgcctcggaattgtattttttacgttttttagtggaatttgggcttcagccgaaaaaataccactgggagcaattttcgaacagggcacagatgacgtccaaacagcatttaaatttgcgatgttgcagcacaatcaaaatatttccagtagaaaatttgaatttcaagcatatgttgacgttattaatactgcggatgcatttaaattgtctagattaatttgcactcaattttcaagaggtgtatattcgatgttgggagcagtttctccagattcatttgatacgctacattcctatagtaatacttttcaaatgccttttgtaacgccttggtttccagaaaaagtattagccccgtcatcgggatttatggactatgctatttcaatgcgacctgaataccacaaagccatcatagatacggttaagtattacggatggaggcagattatatatttatatgattctaatgatggtctcctaaggttacaacagatataccaaggattaactcctggcagtgagatttttcaagtcactactgtacggagaataaacaatgttagcgaagcattatcatttcttagaggaatagaagaacatactcgatggaccaaca

SEQ ID NO: 290 - DNA, 22 bp, Artificial Sequence
  primer
  misc_feature (1)..(22): forward primer
aatttgtgcctcggaattgtat

SEQ ID NO: 291 - DNA, 22 bp, Artificial Sequence
  primer
  misc_feature (1)..(22): reverse primer
tgttggtccatcgagtatgttc

SEQ ID NO: 292 - DNA, 690 bp, Diabrotica virgifera
  misc_feature (1)..(690): WCRW transcript ta41486.001_diavv
gatcacgtcatgggcaccacaaatttgtgcctcggaattgtattttttacgttttttagtggaatttgggcttcagccgaaaaaataccactgggagcaattttcgaacagggcacagatgacgtccaaacagcatttaaatttgcgatgttgcagcacaatcaaaatatttccagtagaaaatttgaatttcaagcatatgttgacgttattaatactgcggatgcatttaaattgtctagattaatttgcactcaattttcaagaggtgtatattcgatgttgggagcagtttctccagattcatttgatacgctacattcctatagtaatacttttcaaatgccttttgtaacgccttggtttccagaaaaagtattagccccgtcatcgggatttatggactatgctatttcaatgcgacctgaataccacaaagccatcatagatacggttaagtattacggatggaggcagattatatatttatatgattctaatgatggtctcctaaggttacaacagatataccaaggattaactcctggcagtgagatttttcaagtcactactgtacggagaataaacaatgttagcgaagcattatcatttcttagaggaatagaagaacatactcgatggaccaacaaatatgtggttctagattgctctactgagactgctaaagaa

SEQ ID NO: 293 - DNA, 710 bp, Diabrotica virgifera
  misc_feature (1)..(710): RNAi target sequence
gctctgttatgtgcgtcaagaatttagaaattttatattatccgtaatggtggtcgaccgtgtgcattctaaaactattaaataatcatgtcgctagagactcgatctaattcagctctgtttaaaagagcagaccaactaaaacgttgggaagaatcagatacaaatcgagaaccagtgtcaccgaaacaaaaaactcggaaaattaaattttcttcgggatgtgtgtttctcgcggcttgtgctgctggtgataaaaaagaagtgttggaattgttacataaaggagctgacatcaatactgcaaatgtggacggattaacagccctacatcaggcatgtatcgacgacaatctcgacatggtggagttcctcgtggagaacggggcggacgtcaacaggggcgacaacgaaggttggacccctttgcacgccactgccagctgcgggtttctctcgatcgcgaagtacctcatcgaaaagggggcccacgtagcggcagttaataacgatggacaattggcacttgatattgccgagagccaaaaaatggaaggactactcagggaagaaattgaggatagaggcatcgactgcgaagcagctaggaacgaagaagaattggtgatgttgagggatgccaaagattggttagcgacaaaaagttccttagttaacgtaccacaccctaaaaacggagctacaccttt

SEQ ID NO: 294 - DNA, 22 bp, Artificial Sequence
  primer
  misc_feature (1)..(22): forward primer
gctctgttatgtgcgtcaagaa

SEQ ID NO: 295 - DNA, 23 bp, Artificial Sequence
  primer
  misc_feature (1)..(23): reverse primer
aaaggtgtagctccgtttttagg

SEQ ID NO: 296 - DNA, 3435 bp, Diabrotica virgifera
  misc_feature (1)..(3435): WCRW transcript ta00860.008_diavv
ttttatattatccgtaatggtggccgaccgtgtgcattctaaaactattaaataatcatgtcgctagagactcgatctaattcagctctgtttaaaagagcagaccaactaaaacgttgggaagaatcagatacaaatcgagaaccagtgtcaccgaaacaaaaaactcggaaaattaaattttcttcgggatgtgtgtttctcgcggcttgtgctgctggtgataaaaaagaagtgttggaattgttacataaaggagctgacatcaatactgcaaatgtggacggattaacagccctacatcaggcatgtatcgacgacaatctcgacatggtggagttcctcgtggagaacggggcggacgtcaacaggggcgacaacgaaggttggacccctttgcacgccactgccagctgcgggtttctctcgatcgcgaagtacctcatcgaaaagggggcccacgtagcggcagttaataacgatggacaattggcacttgatattgccgagagccaaaaaatggaaggactactcagggaagaaattgaggatagaggcatcgactgcgaagcagctaggaacgaagaagaattggtgatgttgagggatgccaaagattggttagcgacaaaaagttccttagttaacgtaccacaccctaaaaacggagctacacctttacatgtagcctgtgccaaaggttatgccgacgttataaaaatattattacaatgtggagctgacattgatgcgcaggatgttgacggctggacccctctacatgcagctgcgcactggggccaaaaggaaacgtgccaaatattggctgaaagtttggctgacatggaagctaaaaacttcgtaggacaaacagcatttgacttgtgtgatactgacatgttatcgacattggaagatcttaaggaaaaaaaaaaaaaaaaaaaaacgaattaatagaagaatggccaagaagagggccgatattaacgataggaatttggaatctgagacgcctaccaaagtgaaaaaggttgagctcgaagggacgaaagtgattagaaatatagaaaagaaaaataacctgaatgccaacaatgaaatcacaacgaacactactgtaccccagaagatcgttgaagacaaagaggatgttactttaaggaagaaaccgtatacaaaacagaattcagatttgagtccaacaaaactgaatagtacgaataatttgactaattccacggaatctataaagattgaaccagaagttactctcaggaaacctcctattgtacaaaatgaaaaaccgactaaaaaagaagacaacgatacaccggtcagtaccgctgcaaccacaaataccacaactaacatatcacaagaaaagacttcaccagtgactagtccacagcctactactaacaaccaacaacaattgcgaagcggtctaaagttgcaaatgccacctccgcctacaacaacggttaccgcccctacaccggtaacgaattcttccacgccctccactcctacaacgccgggaggaaccaggcttcagatgctcaaaaatttctttaagtcgtttgttcctccagtaagggatgaagaaagtgaaactcaaagaaaagcgcatgccaagagggtaagggagactcgacgatccactcagggggtaactttagaagaaatcaaatccgccgaacagttagtaaaacagaagaatcaacctggtggcggcaatgaggaaaagcctggagcaaatggagactcccccaacggaatcgtagttaccgccaccatcacaaccggtactcccacagttataacaactcgtgaaagtgaggaaccacccgcaatacacgaaaggcgaccatcgtggaggttgagggtagacaatggtaccagcaagttcttgttagaagacgcttcaaaaccttcggacccgccaaacacgccgtcgattattcgtaggaccatcgcatccatccaaagaccttcttcagcgcctctagagactgcagatactacaattacactgcctttaagaaaacccaaatccgtagaagaaaaagatcaagataaggagaacgatattagaaatgctcaagcaactctagccacacaagcagctattcaaaggagaagaaggccgaagaggagatcgacaggggtagtttcgtttgataatgttgatgatttggaacaggagaaggattcttcaagtggaaaagactgtgatgatactactaaaatgaatcatttggagagcggcacagaccgaagtagccgatcgagaattggtagttcttcggatattcgaaacgagaacggagaattggactacaaaaaactgtatgaacagcaactcgcagagaacgaccgactgaaagacaaattaaggaaatctgacgaggagttgcgagaaaccaaacaaactttggaaaaaattaacttggtcacaagtaaaaattccttatccgaactagaaaaacgcgaaaggagagccatggagagaaaacttagtgaaatggaagaggaactaaagcaattacaaaagttgaaagctgagaacgaacgcctaaaggccgacaacagatcactcacacgtgtcatcaataaacttaccaactctgcaatgtaatagaatttggaaaatcttaaatccgagaaccagaggttgaaggatgaaaatggtgctcttatcagagtgatcagcaaactgtcaaagtagcataagttttagttgttatcattcatgcattttatgttaaggtgactttaataatttattgttagaaaataatgaaaattcaggatttcccatttttattcacgttgaaagttagtttctttaacacagatttgtagtagttaaattgaatcgtactattgtggacgcgaatgaaaataggacgcgaaaaaaagaatatgaagctgaaatagaggctatcgagatggaaattgtaaagaaaatagcagatgaagaagaagtaacgagatcattaggtatataacaggtcacaaacaataaaagaatatacccagacacaaaaaaataaactaatgtgatcgtagattccagagacaactttaaagtaaatattactagcatccaagaaagatatggatataacacaccatataagagatatatccccgaaaaaaagtaaaactgttaagagaggatctacagtccttatctaaagaaactcaagttgtttaccgagttgtgtactttacgagttttttgcgtacttagaggttttttataaactgtacagaagtaaacaaatacttcataaaaacgtttctgtggggattgatactcggctattttaaatatatttattaaataaatacatgtttttttgtttatacctcataaaagtcattcttatgatccaaaaaaaacaaacaatccatttggcatacttattt

SEQ ID NO: 297 - DNA, 632 bp, Diabrotica virgifera
  misc_feature (1)..(632): RNAi target sequence
  misc_feature (610)..(610): n can be any nucleotide
ggacagtatggaagacgattgggctgtggataatcagagtggtggagttgtcgccccaaaaattgcagaactacctgaaattaagttgttcgctagatggaactgcgatgatgtccaagtttcagacatgtcccttcaggactacattgcagtgaaagaaaaaaatgcaaagtatttaccccattcagctggtagatatgctgcaaaaaggttccgtaaagcacaatgcccaatcgttgagaggttaacaaactctctaatgatgcatggacgtaacaatggtaaaaaattgatggctgtcagaattgttaaacatgcttttgaaattatccatttactaactggagaaaatccattacagattttagtttctgctattatcaattcaggacctagagaagattctactcgtattggtagagctggtactgtaagaagacaagctgttgatgtgtcacccttgagaagggttaaccaagcaatttggttgctctgcacaggtgctagggaagcagcattccgtaatattaaaactattgctgaatgtttggctgatgaattaatcaatgctgccaagggatcatcaaattcatatgctatcaaaaagaanggatgaacttgaacgtgtagcc

SEQ ID NO: 298 - DNA, 21 bp, Artificial Sequence
  primer
  misc_feature (1)..(21): forward primer
gacagtatggaagacgattgg

SEQ ID NO: 299 - DNA, 22 bp, Artificial Sequence
  primer
  misc_feature (1)..(22): reverse primer
ggctacacgttcaagttcatcc

SEQ ID NO: 300 - DNA, 806 bp, Diabrotica virgifera
  misc_feature (1)..(806): WCRW transcript ta21523.001_diavv
gcacgaggagcgattgccggagtggaagtcgctctcaaaaaaagagaaaattagaaaagcaaccttttccggttcacgccgtcgttcagcaagagcttgcgatttttatttttgaaaaatagagagtattctctaatatttaaggacagtatggaagacgattgggctgtggataatcagagtggtggagttgtcgccccaaaaattgcagaactacctgaaattaagttgttcgctagatggaactgcgatgatgtccaagtttcagacatgtcccttcaggactacattgcagtgaaagaaaaaaatgcaaagtatttaccccattcagctggtagatatgctgcaaaaaggttccgtaaagcacaatgcccaatcgttgagaggttaacaaactctctaatgatgcatggacgtaacaatggtaaaaaattgatggctgtcagaattgttaaacatgcttttgaaattatccatttactaactggagaaaatccattacagattttagtttctgctattatcaattcaggacctagagaagattctactcgtattggtagagctggtactgtaagaagacaagctgttgatgtgtcacccttgagaagggttaaccaagcaatttggttgctctgcacaggtgctagggaagcagcattccgtaatattaaaactattgctgaatgtttggctgatgaattaatcaatgctgccaagggatcatcaaattcatatgctatcaaaaagaaggatgaacttgaacgtgtagccaaatccaaccgttaaatttatttctcatttta

SEQ ID NO: 301 - DNA, 546 bp, Diabrotica virgifera
  misc_feature (1)..(546): RNAi target sequence
caagtagggctaaaatgaagcaaattgtaacaaaccaaacggtaaaaattcctgagggaattacagtaaccactaagtcaagggtagtaactgtaaaaggaccccgaggtaatctgaagagatccttcaaacatcttaccctggacattcgaatgatcaaccccaggttactgaaagtagagaaatggttcggtaccaagaaggaattagctgctgtcagaacagtatgctctcatgttgaaaacatgttaaagggtgttacaaaaggataccaatacaagatgagagcagcatatgctcactttcccattaactgtgtcaccactgaaggaaacacagttatcgaaattagaaatttcttgggagaaaaatacatcagaagagtaaagatggccccaggtgttacagtagtaaactccaccaaacaaaaggatgaacttatcattgaaggaaactcattggaggatgtttcaaagtcagctgcccttattcaacaatctacaacagttaaaaataaggatatccgtaaattcttagatgggcttt

SEQ ID NO: 302 - DNA, 23 bp, Artificial Sequence
  primer
  misc_feature (1)..(23): forward primer
caagtagggctaaaatgaagcaa

SEQ ID NO: 303 - DNA, 23 bp, Artificial Sequence
  primer
  misc_feature (1)..(23): reverse primer
aaagcccatctaagaatttacgg

SEQ ID NO: 304 - DNA, 789 bp, Diabrotica virgifera
  misc_feature (1)..(789): 02181.002_diavv
ggggaaaactcttcggaatagaagtcgctttttctgtccattttatgtcacaagtagggctaaaatgaagcaaattgtaacaaaccaaacggtaaaaattcctgagggaattacagtaaccactaagtcaagggtagtaactgtaaaaggaccccgaggtaatctgaagagatccttcaaacatcttaccctggacattcgaatgatcaaccccaggttactgaaagtagagaaatggttcggtaccaagaaggaattagctgctgtcagaacagtatgctctcatgttgaaaacatgttaaagggtgttacaaaaggataccaatacaagatgagagcagcatatgctcactttcccattaactgtgtcaccactgaaggaaacacagttatcgaaattagaaatttcttgggagaaaaatacatcagaagagtaaagatggccccaggtgttacagtagtaaactccaccaaacaaaaggatgaacttatcattgaaggaaactcattggaggatgtttcaaagtcagctgcccttattcaacaatctacaacagttaaaaataaggatatccgtaaattcttagatgggctttatgtatctgaaaaaacaactgttgtacaagaagaataacttgtatttttgaaataaatttaagtttatatttaaaaaaaaaaaaaaaaaatccgttcaacaatctacaacagttaaaaataaggatatccgtaaattcttagatgggctttatgtatctgaaaaaacaactgttgtacaagaagaataacttg

SEQ ID NO: 305 - DNA, 409 bp, Diabrotica virgifera
  misc_feature (1)..(409): RNAi target sequence
ctcttttgacaacggccaacgttctaaagttgcatcatggcgtcttcagaaggtgcaggcgtgactacaggtcaaccaaatttacacaaacaagatttatctaaattggatgttaaaagattgacggctttatctccagaagttataagtagacaagctaccattaacattggtacaattggacatgtagcgcatggaaaatcgactgtggttaaggccatatctggggtacaaactgtcagatttaagaatgaactggaaaggaacattaccattaagctaggttatgctaacgcaaaaatctacaaatgtgataatccgaaatgccccaggccctcctgctttatttcgggcagttcttcaaaggacgacagtttcccttgtttacgtccagcatgttcgggtagat

SEQ ID NO: 306 - DNA, 20 bp, Artificial Sequence
  primer
  misc_feature (1)..(20): forward primer
ctcttttgacaacggccaac

SEQ ID NO: 307 - DNA, 20 bp, Artificial Sequence
  primer
  misc_feature (1)..(20): reverse primer
atctacccgaacatgctgga

SEQ ID NO: 308 - DNA, 1691 bp, Diabrotica virgifera
  misc_feature (1)..(1691): WCRW transcript ta02330.001_diavv
ggacaagtgacgtgttttcatgaacgttagatgtcaaaattattggccgcctcttttgacaacggccaacgttctaaagttgcatcatggcgtcttcagaaggtgcaggcgtgactacaggtcaaccaaatttacacaaacaagatttatctaaattggatgttaaaagattgacggctttatctccagaagttataagtagacaagctaccattaacattggtacaattggacatgtagcgcatggaaaatcgactgtggttaaggccatatctggggtacaaactgtcagatttaagaatgaactggaaaggaacattaccattaagctaggttatgctaacgcaaaaatctacaaatgtgataatccgaaatgccccaggccctcctgctttatttcgggcagttcttcaaaggacgacagtttcccttgtttacgtccagcatgttcgggtagattccaattggtcagacatgtcagctttgtagattgccctggtcacgacattcttatggctaccatgcttaacggagccgctgtgatggacgcagcattgttattaatagcaggaaacgaatcatgtcctcaacctcaaactagtgaacatttggctgctatcgaaatcatgaagttgaaacacatcctcattcttcaaaataaaatagatttggtgaaggaagggcaagccaaggagcaacatgagcaaattgtgaaatttgtccaaggaactgtagctgaaggagcccctataattcccatatccgctcagttgaaatataacatcgaggttttgtgcgaatatatcactaaaaaaattccaataccaatgagagattttacttctgaaccaaggctgatcgtgatcagatcttttgatgttaataaacctggttgtgaagttaacgatttaaaaggaggtgtagctggtggcagtattttaagaggagtgttgaaggtgggacaagaaattgaagtaagacctggactagttagcaaggactcagaaggaaagctggcctgccgaccaatattctctagaatagtatctctatataccgaacaaaacgaactgcagtttgcagttccaggaggactcattggtgtcggtaccaaaatcgaaccaaccctttgcagagccgatcgacttgtaggtcaagttttgggagcagttggtgctctacctagtatctttacagaacttgaggtgagttactatctattgaaacgtttgctgggagtccgtacagaaggagacaagaaaggggccaaagtccagagattaaccagaagtgaagtactccttgtcaacattggatccctcagcacgggaggacgagttgtagccactaaggccgatttgtgcaagatcgctttaacgaatccagtctgtacggaaatcggcgaaaagattgcactcagtagacgtgttgaaaaacattggcgtctcatcggatgggggcagatccgcggaggggagacaatcgagcctaccacaagctaggctttttatactcgtaccggtcttttcaggacactttaagccaatttttgttttctatttaatatcgttttattaaagaagtgtttacgttttgtttatatcttttaggttgatttttattactgctatagtgtactgattatccgattcaaatataatgtctataaaactaaaaaaaaaaaaaaaaaa

SEQ ID NO: 309 - DNA, 670 bp, Diabrotica virgifera
  misc_feature (1)..(670): RNAi target sequence
attgcagtcattgctgtagtgcacacgtaatttaagtatttatttaagaattgtctgcaaataattaattataagatggctaaagccccagctgtaggtattgatttaggaaccacatactcctgtgtaggagttttccaacatggcaaagttgaaattattgccaacgaccaaggtaacagaaccacaccatcatatgtggccttcacagacacagaacgtctcatcggagatgctgccaagaaccaggtagccatgaaccccaataacacaatttttgatgccaaacgtcttattgggcgtcgctttgatgacagtgctgtacagtctgacatgaaacattggccatttgaagtagtaaatgatgcaggtaaaccaaagattaaagttgcatacaagggcgaagacaaatccttctacccagaagaagtcagttccatggtccttacaaaaatgaaggaaacagcagaagcatacttaggaaagaatgtcaccaacgctgtcatcacagtacctgcatatttcaatgactcacaacgtcaagctaccaaagatgctggaaccattgctggactccaggtattacgtattattaacgaacccactgctgctgccatcgcctatggtttagacaaaaagggccaaggtgaaagaaacgtcctcattttcg

SEQ ID NO: 310 - DNA, 22 bp, Artificial Sequence
  primer
  misc_feature (1)..(22): forward primer
attgcagtcattgctgtagtgc

SEQ ID NO: 311 - DNA, 22 bp, Artificial Sequence
  primer
  misc_feature (1)..(22): reverse primer
cgaaaatgaggacgtttctttc

SEQ ID NO: 312 - DNA, 2609 bp, Diabrotica virgifera
  misc_feature (1)..(2609): WCRW transcript ta00491.010_diavv
  misc_feature (19)..(19): n can be any nucleotide
  misc_feature (49)..(49): n can be any nucleotide
ggcccatggaactgacttnttctgggtagaaggatttgtctttcgcccnttgtatgcaaactttaatcttttggtttaccttgcatcatttattactttcaaatggccaatgtttcatgtcagactgtacagcactgtcatcaaagcgacgcccaataagacgtttggcatcaaaaattgtgttattggggttcatggctacctggttcttggcagcatctccgatgagacgttctgtgtctgtgaaggccacatatgatggtgtggttctgttaccttggtcgttggcaataatttcaactttgccatgttggaaaactcctacacaggagtatgtggttcctaaatcaatacctacagctggggctttagccatcttggggggatttgattgcagtcattgctgtagtgcacacgtaatttaagtatttatttaagaattgtctgcaaataattaattataagatggctaaagccccagctgtaggtattgatttaggaaccacatactcctgtgtaggagttttccaacatggcaaagttgaaattattgccaacgaccaaggtaacagaaccacaccatcatatgtggccttcacagacacagaacgtctcatcggagatgctgccaagaaccaggtagccatgaaccccaataacacaatttttgatgccaaacgtcttattgggcgtcgctttgatgacagtgctgtacagtctgacatgaaacattggccatttgaagtagtaaatgatgcaggtaaaccaaagattaaagttgcatacaagggcgaagacaaatccttctacccagaagaagtcagttccatggtccttacaaaaatgaaggaaacagcagaagcatacttaggaaagaatgtcaccaacgctgtcatcacagtacctgcatatttcaatgactcacaacgtcaagctaccaaagatgctggaaccattgctggactccaggtattacgtattattaacgaacccaccgctgctgccatcgcctatggtttagacaaaaagggccaaggtgaaagaaacgtcctcattttcgatctgggtggtggtacttttgatgtatcaatcttaacaattgaagatggtatctttgaagtcaaatcaactgctggagacactcacttgggaggtgaagacttcgacaacagaatggtcaatcactttgttggagaattcaagaggaaatacaagaaggaccttaccacaaacaaacgtgccctccgtcgtttgagaacaagctgtgaaagagctaagcgtaccctttcctcatcaacccaagccagcattgaaatcgattctctatttgagggtattgacttctacacctcaatcaccagggctagatttgaagaactcaacgctgatttgttcagatctaccatggaacctgtagaaaaggccatcagggatgccaagatggacaaatctcaagttcacgatattgtgttggttggtggatctacccgtattccaaaggtacaaaaactgttgcaagatttcttcaatggtaaagaattgaacaagtcgatcaaccccgatgaagctgttgcttatggtgcagccgtccaagccgccatcttgcacggagataagtctgaggaagtacaggacttgctcttgctcgatgtcactccactctcattgggtattgaaactgccggaggtgttatgactgccctcatcaaacgtaacactaccattcccaccaagcaaacccagaccttcactacttactctgacaaccaacccggagtacttattcaggtatatgaaggtgaacgtgccatgaccaaggacaacaacctcttgggaaaattcgaacttactggcattcctcctgcgccccgtggtgtccctcagattgaagtaaccttcgacattgatgccaacggtatcttgaacgtcacagctattgaaaaatccaccaacaaagaaaacaagatcaccatcaccaatgataaaggtcgtctcagcaaagaagacattgaaagaatggtcaacgatgcagaaaaataccgtaacgaagatgataagcaaaaggctaccatctctgccaagaacgtcctcgaatcatactgtttcaacatcaagagcaccatggaagatgacaaaatcaaggacaagatcagcgaaagtgacaaaactaccgtcatggagaaatgcaacgaggttattgcttggttggatgctaaccaattagccgacaaggaagaatatgaacacaaacaaaaggagctcgaaaacatctgcaaccccatcatcaccaagttgtaccaaggtgccggtggagctccaggtggcatgcccggtggtttcccaggtggagcagctccaggagctgcaggcgccgctggaggtgctggaccaaccattgaagaagtcgattaaactattcattccattttttaaacttttgttaaccgttgtgcagtattacttgcagacaaagctttttaaaattactttttttacacaatttttcaattgttaaacaacgtttttggtaacagttcaaaaattactgcaataattatgttcgttcatgaataaaataaaaagtcaaatccgaaaaaaaaaaaaaaaaa

SEQ ID NO: 313 - DNA, 672 bp, Diabrotica virgifera
  misc_feature (1)..(672): RNAi target sequence
  misc_feature (648)..(648): n can be any nucleotide
  misc_feature (649)..(649): n can be any nucleotide
tacacgtaaaaatggcttcgacgatatcggcaagacaggctaacagagaacatgttttggccgtatccagagacttcatatcccaaccaagactcacttacaaaactgtatctggtgtcaacggtccactagtaatcctcgaagatgtcaaatttcctaagttcaacgaaattgtccaactcagattatctgacggaagtttaagatcaggtcaagtacttgaagtcagcggttccaaggctgtagtacaagtattcgaaggtacatcaggtatcgatgccaaacacactgtctgtgagttcacaggagatattctcagaactccagtctctgaggatatgttgggaagagtattcaacggctctggaaaacctattgacaaaggtcccccaattctggctgaagactacctagatatccaaggacaacccatcaacccatggtcccgtatctacccagaggaaatgatccaaactggtatcacagctatcgatgtgatgaactcgattgcccgtggtcagaagattcccattttctcagctgctggtctgccacataacgatattgctgcccaaatttgtaggcaagccggtcttgtcaaaatcccaggcaaatcagttttggatgaccacgaagannctttgccatcgtgttcgctgctatgggtgttaa

SEQ ID NO: 314 - DNA, 22 bp, Artificial Sequence
  primer
  misc_feature (1)..(22): forward primer
tacacgtaaaaatggcttcgac

SEQ ID NO: 315 - DNA, 21 bp, Artificial Sequence
  primer
  misc_feature (1)..(21): reverse primer
ttaacacccatagcagcgaac

SEQ ID NO: 316 - DNA, 2583 bp, Diabrotica virgifera
  misc_feature (1)..(2583): WCRW transcript ta00620.001_diavv
tcttaaacttccgtcagatgggggcagttgctaattttttactgtctttgatagacgtctcctgtacacgtaaaaatggcttcgacgatatcggcaagacaggctaacagagaacatgttttggccgtatccagagacttcatatcccaaccaagactcacttacaaaactgtatctggtgtcaacggtccactagtaatcctcgaagatgtcaaatttcctaagttcaacgaaattgtccaactcagattatctgacggaagtttaagatcaggtcaagtacttgaagtcagcggttccaaggctgtagtacaagtattcgaaggtacatcaggtatcgatgccaaacacactgtctgtgagttcacaggagatattctcagaactccagtctctgaggatatgttgggaagagtattcaacggctctggaaaacctattgacaaaggtcccccaattctggctgaagactacctagatattcaaggacaacccatcaacccatggtcccgtatctacccagaggaaatgatccaaactggtatcactgccatcgatgtgatgaactcgattgcccgtggtcagaagattcccattttctcagctgctggtctgccacataacgatattgctgcccaaatttgtaggcaagccggtcttgtcaaaatcccaggcaaatcagttttggatgaccacgaagacaactttgccatcgtgttcgctgctatgggtgttaacatggagactgctagattcttcaaacaagatttcgaagaaaatggttctatggaaaacgtatgtttgttcttgaacttggctaacgatccaaccatcgaaagaatcatcaccccacgtcttgctctaacagccgctgaattcttggcttaccagtgcgaaaaacacgtgttagtcattttaactgacatgtcttcatacgctgaagctttgcgtgaggtatctgccgccagagaggaagtacccggtcgtcgtggtttccccggttacatgtacaccgatttggccaccatctacgaacgtgccggtcgtgtcgaaggccgtaacggttccatcactcaaatccccatcttgactatgcctaacgacgatattactcaccctattcccgatttgacaggttatattaccgaaggacagatctacgtcgaccgtcaattgcacaacaggcagatctacccaccaattaacgtactgccatctctctcacgtttgatgaagtctgctatcggcgaaggtatgaccaggaaggaccactctgacgtttctaaccaattgtatgcttgttatgctatcggtaaggacgtccaggccatgaaagccgtagtaggtgaagaagctctaacacccgacgatcttctctacctcgagttcctaacgaaattcgaaaagaacttcatcacccaaggaaactacgaaaaccgcaccgtcttcgagtctttggacatcggctggcaactactccgtatcttccctaaggaaatgttgaaacgtatccctgcaagcacattggcggaattctatccaagagactctcgtcactagttggtttatgtataaaatttatatatatttaggaagtttgttaggtttgttacaaatatgtccacttattgtatcgattattttcaattgagagatattttaccaaaacaatttgagccgatgagattctacggtgtaatttttgtaaatacttaaagagcgtgtttcaaaaatgcgcttaatataatatattatcaatacagagcaacctttttttctttattattttttcttgttgaacaatatataaagttcttgaactccctaagtggaacatagagcttcagtgaaaatgcaccatcacctcattccaagactttccttgacttcttaccaattgttggacaattataactcagattaattttactaggtgacagttccataagtaaaaatatgcaatggctatatattgcgtactaaacttaagaagaaaaattgtgtcgctctggaagaaagattacttgcataagaatgaaaatcagtgtcatattttgcgtttatgacatccctagacgatactattttttcgttactatattttttttaaagagatcaagagcaacaatttggagactgatattcttatgcgagttgttttcctactttgtcctattttgaagagtctacaattatttacttaccatttgattaaattagatgaacataagacaatactatatttttatcatgtaagttgatattccctatgtaaattattggcacaatgtaacctccaacttgatttatacatttattttacttttgtttgtctattttttctgtaatagagtggaagaattaacattccattaaatgtcattgcccaatgtataaagcaatatacctcttaccattcgatgctttttcagtattttaattctagatggtgaacggagatttttcttgatgtaggttttgacattttcgatgttactgtaaaaatctaattttatgttaaatagattagtgtacaaaaatgtgaataaacactatacatatgttaaaaaaaaaaaaaaaaaa

SEQ ID NO: 317 - DNA, 500 bp, Diabrotica virgifera
  misc_feature (1)..(500): RNAi target sequence
actttgacgagaggcgttgttagttacttcgttgtgtcgacatttttctgtttagtgtaccgattaatcttcaaatattacaatggctgaccaactcaccgaagaacaaattgccgaattcaaagaagctttctcactattcgataaagatggtgatggtacaattacgactaaagaattaggaacagtaatgagatctctaggacaaaatccaacagaggctgaattacaggatgtgaccaatgaagtagatgccgatggtaacggcacgatcgatttcccagaatttttaacgatgatggcacgtaaaatgaaagataccgatagtgaggaagaaattcgtgaagcattccgagtgttcgacaaagacggcaatggtttcatctcagcagcagaattgcgccacgtcatgaccaacttgggtgaaaaattgacagacgaagaagtcgatgaaatgattcgggaggccgatatcgatggtgatggtcaagtcaattacg

SEQ ID NO: 318 - DNA, 20 bp, Artificial Sequence
  primer
  misc_feature (1)..(20): forward primer
actttgacgagaggcgttgt

SEQ ID NO: 319 - DNA, 22 bp, Artificial Sequence
  primer
  misc_feature (1)..(22): reverse primer
cgtaattgacttgaccatcacc

SEQ ID NO: 320 - DNA, 713 bp, Diabrotica virgifera
  misc_feature (1)..(713): WCRW transcript ta02046.005_diavv
gcagcagcagttcccccctctcttctcttacgtcgatcctaaacaaaacgagaaaagacagttggctggtgcactttgacgagaggcgttgttagttacttcgttgtgtcgacatttttctgtttagtgtaccgattaatcttcaaatattacaatggctgaccaactcaccgaagaacaaattgctgaattcaaagaagctttctcactattcgataaagatggtgatggtacaattacgactaaagaattaggaacagtaatgagatctctaggacaaaatccaacagaggctgaattacaggatatgatcaatgaagtagatgccgatggtaacggcacgatcgatttcccagaatttttaacgatgatggcacgtaaaatgaaagataccgatagtgaggaagaaattcgtgaagcattccgagtgttcgacaaagacggcaatggtttcatctcagcagcagaattgcgccacgtcatgaccaacttgggtgaaaaattgacagacgaagaagtcgatgaaatgattcgggaggccgatatcgatggtgatggtcaagtcaattacgaagagtttattagaagtcacctcttggccaactaagatattattgattacaaagaaaaatagaagaatatattataatttacagatactatattaatgataatagaataagaataaaatgtaaataaatagttttgctcat

SEQ ID NO: 321 - DNA, 514 bp, Diabrotica virgifera
  misc_feature (1)..(514): RNAi target sequence
tttggcaacattgtgtatgatgtcataggagcggggtcagataggaatgttgtagttttgaatgatatacacatagatataatggactatatagtgcctgctagttgtacagatagcgagtttatgagaatgtgggcggaatttgaatgggaaaataaggtaaccgttaacacacccctcacggaactttcagaatacctcgaacatctactcaaaagcacaaatttgaaatgtttaacatcagaaaaagctctgagcgggcagtgtggttttatggcagccaatttatatgcaaaatccatttttggagaagacgctttggccaacttaagtatagagaaaccttttaataaacccgatgcgccagtaagcggtcatattagaataagggccaaaagtcagggcatggccttaagtttaggagacaaagtcaatatgacacagaagagcacacaacataaagtagtagctgcataaataaaaacgtttttttctgtttcaacccttttcttca

SEQ ID NO: 322 - DNA, 22 bp, Artificial Sequence
  primer
  misc_feature (1)..(22): forward primer
tttggcaacattgtgtatgatg

SEQ ID NO: 323 - DNA, 23 bp, Artificial Sequence
  primer
  misc_feature (1)..(23): reverse primer
tgaagaaaagggttgaaacagaa

SEQ ID NO: 324 - DNA, 3271 bp, Diabrotica virgifera
  misc_feature (1)..(3271): WCRW transcript ta00934.001_diavv
gggggtcgcatcaaaacgtcaacaatctgacacgtctgtaatgtttagcctgaattttgagtaaaattaccgaaaaacataattaaaattgatttattaagagtacataataacgtacgaaaatgaccgcggtagaacaaccttgttacacactaataaacttgccaacagattcggagccctacaatgaaatgcaactaaaaatggatttagaaaagggtgaggttaaagtaaaaataagagcattagaaaaaataattcacatgattctggcaggagaaaggttgccgaatggattcctaatgaccatcataagaaacgttttacctctacaagatcatttggcaaaaaaactattattgattttctgggaaatagttccaaaaacaaatccagaaggtaaactactacaagagatgattttggtatgtgatgcctatagaaaagatctgcaacacccaaatgaatttttgagaggttctacacttcgcttcttgtgcaaactgaaggaaccagaattgttggaaccattaatgcccagtattagagcttgtttggatcataggcacagctatgtgaggaggaatgctgtactggcaatttttaccatttacaaaaattttgaagccctcattccagatgctcctgaactgatctccaattatttggatggtgagcaagacatgtcttgtaaaagaaatgcgtttttaatgcttcttcatgctgaccaagaaagggcgttgtcgtatttggcatcatgtttagatcaagtaaattcatttggagatattctacaactggtcatcgttgagttgatatataaggtgtgtcattccaatcctgcggaaagatctagatttattagatgtatatataacttgttgaactcaagcagtcctgctgtcaggtacgaagctgcaggaactttagtcaccctctccagtgccccgactgccgttaaagctgctgctagctgttacattgagttaattatcaaagaaagtgacaacaatgtaaaactcatcgttttggacaggctgatagcacttaaggagcttcctaatcacgaaagaattctgcaggatttagttatggacatactgagagtactctctgctcctgacttagaagtccgcaagaagactttaagtctagcccttgaattagtctcttcacggaacatagaagaaatggtattagtattaacaaaggaagtgagtaaaacggtagacagtgaacatgaggatacaggaaagtacaggcaattgttagtaaggactctacattcgtgttccattaagttcccagatatcgcacgtagtgttataccagtcttgattgaatttttatccgataataatgaactggctgccacagatgtattgctgttcttaagggaagccatacagaagtttaaagaattgcaaccgttaattattgagaaactcatcgaaactttcaaagacattaaattggtcaaagtccatagagcagcaatttggattttgggagaatacgcgagtactgcttccgatatagaagttatcgttggagaaattaacagattgttgggtgaaggatccctcgttgaagctgagcagaagttaatagcaggagatacggaagagaatgctcctgcacctgctgcaggcgccaccactttagttacttccgatggaacatatgctacccaatcagctttcaacactgtcagccaaaccactaaagaagcacgacctcctctaagacaatacctcatggatggtgattttttcatcggagcctctttggcatctacattaaccaaactgtctttgcggtatgaggacctcacctctcctgctgctagcaatggattcaatgccaaaattatgcttattatggctggaattcttcacttgggaaaatcaggacttcccacaaaatcaataaccaacgacgataaagaccacattctgttctgtttacgagtcctatctgatcgttctccaatcattgttgaaattttcaaaaaattgtgccgctcggcactaaatgagatgcttctagctaaggaatcggtagaagcgatctcgcaaaagagcaaagaaaaaaacaagcgtacgattcaaactgacgacgctataagcttcctgcaattagagacagataaaagtggagagctaggagaaaacgtattcgagatgtcgctgtcacaagctttagtaggaggtcgaacgggaggtggcgaatcagtattaagttccaataaattagataaaatcacacaactgactggtttttccgatccagtttattccgaagcatacgttcacgtgaatcagtacgatatcgtgcttgatgtcttaatcgtaaaccaaactaacgatactttacaaaactgcacgctagagctggctactttaggcgatttgaagttggtagagaagccacaacctgtcgtattggcgcccaaagacttttgcaacattaaagctaacgtgaaagtggcctcaactgaaaacggaattatatttggcaacattgtgtatgatgtcataggagcggggtcagataggaatgttgtagttttgaatgatatacacatagatataatggactatatagtgcctgctagttgtacagatagcgagtttatgagaatgtgggcggaatttgaatgggaaaataaggtaaccgttaacacacccctcacggaactttcagaatacctcgaacatctactcaaaagcacaaatttgaaatgtttaacatcagaaaaagctctgagcgggcagtgtggttttatggcagccaatttatatgcaaaatccatttttggagaagacgctttggccaacttaagtatagagaaaccttttaataaacccgatgcgccagtaagcggtcatattagaataagggccaaaagtcagggcatggccttaagtttaggagacaaagtcaatatgacacagaagagcacacaacataaagtagtagctgcataaataaaaacgtttttttctgtttcaacccttttcttcattttaaatcatattctgtaatttaattaatttaatatcatattactggttacacattgttagattataaatatcttttaaagaataaaatttatttagcttttacaaagagcggaaagcaatctttatcttcttctaataagatcaacataaagttttctggaaaatataatatataatttaaaaatgtttagcatttattagtgaaatacatggcttactattttgatgacaaagtcagtgta

SEQ ID NO: 325 - DNA, 606 bp, Diabrotica virgifera
  misc_feature (1)..(606): RNAi target sequence
  misc_feature (577)..(577): n can be any nucleotide
gccctcatcaaacgtaacactaccattcccaccaagcaaacccagaccttcactacttactctgacaaccaacccggagtacttattcaggtatatgaaggtgaacgtgccatgaccaaggacaacaacctcttgggaaaattcgaacttactggcattcctcctgcgccccgtggtgtccctcagattgaagtaaccttcgacattgatgccaacggtatcttgaacgtcacagctattgaaaaatccaccaacaaagaaaacaagatcaccatcaccaatgataaaggtcgtctcagcaaagaagacattgaaagaatggtcaacgatgcagaaaaataccgtaacgaagatgataagcaaaaggctaccatctctgccaagaacgtcctcgaatcatactgtttcaacatcaagagcaccatggaagatgacaaaatcaaggacaagatcagcgaaagtgacaaaactaccgtcatggagaaatgcaacgaggttattgcttggttggatgctaaccaattagccgacaaggaagaatatgaacacaaacaaaaggagctcgaaaacatctgcnaccccatcatcaccaagttgtaccaaggt

SEQ ID NO: 326 - DNA, 22 bp, Artificial Sequence
  primer
  misc_feature (1)..(22): forward primer
gccctcatcaaacgtaacacta

SEQ ID NO: 327 - DNA, 22 bp, Artificial Sequence
  primer
  misc_feature (1)..(22): reverse primer
accttggtacaacttggtgatg

SEQ ID NO: 328 - DNA, 2209 bp, Diabrotica virgifera
  misc_feature (1)..(2209): WCRW transcript 454run12_isotig00560
gatttgattgcagtcattgctgtagtgcacacgtaatttaagtatttatttaagaattgtctgcaaataattaattataagatggctaaagccccagctgtaggtattgatttaggaaccacatactcctgtgtaggagttttccaacatggcaaagttgaaattattgccaatgaccaaggtaacagaaccacaccatcatatgtggccttcacagacacagaacgtctcatcggagatgctgccaagaaccaggtagccatgaaccccaataacacaatttttgatgccaaacgtcttattgggcgtcgctttgatgacagtgctgtacagtctgacatgaaacattggccatttgaagtagtaaatgatgcaggtaaaccaaagattaaagttgcatacaagggcgaagacaaatccttctacccagaagaagtcagttccatggtccttacaaaaatgaaggaaacagcagaagcatacttaggaaagaatgtcaccaacgctgtcatcacagtacctgcatatttcaatgactcacaacgtcaagctaccaaagatgctggaaccattgctggactccaggtattacgtattattaacgaacccactgctgctgccatcgcctatggtttagacaaaaagggccaaggtgaaagaaacgtcctcattttcgatctgggtggtggtacttttgatgtatcaatcttaacaattgaagatggtatctttgaagtcaaatcaactgctggagacactcacttgggaggtgaagacttcgacaacagaatggtcaatcactttgttggagaattcaagaggaaatacaagaaggaccttaccacaaacaaacgtgccctccgtcgtttgagaacaagctgtgaaagagctaagcgtaccctttcctcatcaacccaagccagcattgaaatcgattctctatttgagggtattgacttctacacctcaatcaccagggctagatttgaagaactgaacgctgatttgttcagatctaccatggaacctgtagaaaaggccatcagggatgccaagatggacaaatctcaagttcacgatattgtgttggttggtggatctacccgtattccaaaggtacaaaaactgttgcaagatttcttcaatggtaaagaattgaacaagtcgatcaaccccgatgaagctgttgcttatggtgcagccgtccaagccgccatcttgcacggagataagtctgaggaagtacaggacttgctcttgctcgatgtcactccactttcattgggtattgaaactgccggaggtgttatgactgccctcatcaaacgtaacactaccattcccaccaagcaaacccagaccttcactacttactctgacaaccaacccggagtacttattcaggtatatgaaggtgaacgtgccatgaccaaggacaacaacctcttgggaaaattcgaacttaccggcattcctcctgcgccccgtggtgtccctcagattgaagtaaccttcgacattgatgccaacggtatcttgaacgtcacagctattgaaaaatccaccaacaaagaaaacaagatcaccatcaccaatgataaaggtcgtctcagcaaagaagacattgaaagaatggtcaacgatgcagaaaaataccgtaacgaagatgataagcaaaaggctaccatctctgccaagaacgtcctcgaatcatactgtttcaacatcaagagcaccatggaagatgacaaaatcaaggacaagatcagcgaaagtgacaaaactaccgtcatggagaaatgcaacgaggttattgcttggttggatgctaaccaattagccgacaaggaagaatatgaacacaaacaaaaggagctcgaaaacatctgcaaccccatcatcaccaagttgtaccaaggtgccggtggagctccaggtggcatgcccggtggtttcccaggtggagcagctccaggagctgcaggcgccgctggaggtgctggaccaaccattgaagaagtcgattaaactattcattccattttttaaacttttgttaaccgttgtgcagtattacttgcagacaaagctttttaaaattactttttttacacaatttttcaattgttaaacaacgtttttggtaacagttcaaaaattactgcaataattatgttcgttcatgaataaaataaaaagtcaaatccgc

SEQ ID NO: 329 - DNA, 718 bp, Diabrotica virgifera
  misc_feature (1)..(718): RNAi target sequence
gttgggattgggatttaacaaatacgtcgttctaaatttctaaaactgcatacaaaaaatccttaaaaaactagtgaagattactaaagtgcaatagatacaaaaacaatatttttacgtattcaccataataatataaacgtagaaaatgaatcccgagtatgattatttattcaaacttctgctgattggagattcaggagtaggaaaatcttgtcttctactgagatttgcagatgatacctacacagaaagctatattagtaccattggcgtagattttaaaatcaggacaatcgatttagatggaaagacaattaaattgcaaatttgggatacagcaggtcaggaaaggtttagaacgattacatcaagttattaccgaggagcacatggtattattgtagtgtacgattgcacagaccaagattcattcaataacgttaaacaatggctcgaagaaatcgaccgttatgcgtgtgacaatgtaaacaaattactggtagggaataaaagcgatttgacaactaagaaagttgtcgacttcactacagccaaggagtatgccgaccaattgggtataccatttttggaaacctcagctaagaatgcaaccaatgtagaacaggcctttatgactgtggccgctgaaataaaaaatagagtaggacctccatcttctgcggtagaccaaggaaataaggttaggttcgatcaa

SEQ ID NO: 330 - DNA, 22 bp, Artificial Sequence
  primer
  misc_feature (1)..(22): forward primer
gttgggattgggatttaacaaa

SEQ ID NO: 331 - DNA, 24 bp, Artificial Sequence
  primer
  misc_feature (1)..(24): reverse primer
ttgatcgaacctaaccttatttcc

SEQ ID NO: 332 - DNA, 4464 bp, Diabrotica virgifera
  misc_feature (1)..(4464): WCRW transcript ta00232.001_diavv
gaatcaaggggttgggattgggatttaacaaatacgtcgttctaaatttctaaaactgcatacaaaaaatccttaaaaaactagtgaagattactaaagtgcaatagatacaaaaacaatatttttacgtattcaccataataatataaacgtagaaaatgaatcccgagtatgattatttattcaaacttctgctgattggagattcaggagtaggaaaatcttgtcttctactgagatttgcagatgatacctacacagaaagctatattagtaccattggcgtagattttaaaatcaggacaatcgatttagatggaaagacaattaaattgcaaatttgggatacagcaggtcaggaaaggtttagaacgattacatcaagttattaccgaggagcacatggtattattgtagtgtacgattgcacagaccaagattcattcaataacgttaaacagtggctcgaagaaatcgaccgttatgcgtgtgacaatgtaaacaaattactggtagggaataaaagcgatttgacaactaagaaagttgtcgacttcactacagccaaggagtatgccgaccaattgggtataccatttttggaaacctcagctaagaatgcaaccaatgtagaacaggcctttatgactatggccgctgaaataaaaaatagagtaggacctccatcttctgcggtagaccaaggaaataaggttaggttcgatcaaagtcgcccagtcgaaacaaccaaatccggttgctgctgaaaatatttagttctctttggttgaaggtggtcactcatgtcatctcttttgtacggtagcagcgctacagttactcttattctagtaatatccgtctgtatgtatagttattttaaagtttttgatttgattttcactttagatttttttttcaaaaatatagaaaacaccaatatctcttagcctaatcttaactcccttagataaatatgtaattaacaaaaatatttataaaaccatttttactaaactattagtccacagtatatcgttccttttcaggaatgattgcaaaagtcttaaaaatggttttaattgtttcgtttaaacgagtctaccactttatgaaaaatttcagaaagattatacgttgaaataaaataaattatttttgtcggacaaaaaagaggggcaaacacccgcaagatgtcactctagcgcggtacagttttgttaattacaaaactcataattttcaattgaaagtattgataattactaaatattgtggatctcttgtccgacaaatttgcagcctcgtttctttagtaggacaacggaaatatgttaattatggtaggttatggtttgcggttacaaaagtcataattttaattttttaacgttcaaactgttcaaaaagtaattgtccgacaaaaaaattgttcgacgcaaacttataacaaaaacagtgacagtctacttgtgtttgtcggtataatcgcaaattacctacctctagtatagatgcttagtctagtaattagtctgttccgctctgcggaattgagtaaatggaattaattaaaaataagtgtaaactatgaacaataatatatttatttgtgtcgataaaaagacgtgttttgctcgaaagggtgtgttgttgacgcaccgcatctatcccgacgcccgctggggtgtgactgccgacgggaggttgtaaatcgacccgtggttatgtatcgactgacgctgtggctgaaaaaaaccacaaacgctaatatgtttgtacttctaacatctggccagaaaagcgataaattactacatctgtagttttaagaaacgtcttcgaatgcatttccatgcattgacatggaatctgataaggtaattaattcatggggaattcagtttgttaaactgaacacaccaaaaatatggttagggatacatttcgtttcgtaaaacttcttagcatctggtttgtatattaaatgtgaatttatatgaccgttttgagaaatgatattaaaaaataaaattagcaaaaatagtaattaaagcgtgtcgccacaagtctatgtttacattcggtttctatacattttctgacgttctaaacgtcactggcataacagtctaaacagtgcaacaagtaaagggtccagggctatgttagctcaatttatctagtactgtggcggttgcagtaaaaaaagttttgaaattaatttgtcggactggctatctgatacccaatttttgtcggacattgctctatttggataaagaaccctccaatctatcactttcgtgttcgaaattttataatcgcaatctgcataattgttaattattaacatatttgcgttgttcggctaaagaggggaggctgcaaatttgtctgacaagagatcaacaatctagtaattaattattaataaactaaaagtgggtagttccctgggttggctgtataccatgtagttaaaaaactctaaacatgtagtaaggccacttctgtgtaaaaggtgtatgtactgaaattttaaaaatcccgatggattgaataaactaggttcattcagaacgttttcggacctgtcagtccatcatcagtgaattcatatatacttgcgctaactagtcccagaaccaaacaatggttgtacttataaatcaatctacattatagtgttatgtatttggaaaggctaagcgccgatgttctgatggactgataggtccgaaaacgttctgaattggaacctattttaatcaattcattgggatttttagggttgtagtagatataccttttacacagaagtggttttatttcatgttttttgtccgacgaaaataatttattttattctaacgcgtaattttttgattaaaattaaaaattatagttttgcaatctcaaaacaaccgcgctagagctacaggtttaaaaggaagtcatcaaaaccatttttaagacttttgtaatcatttttgaaaaacgacgatatactgtggactacatatatgagatcattagaacgagaaagatatactcatcgactgttaattttgtattgtttttagtatacctttctctgttttataaatccagatcatgatagattgacgttagaaattattgttcgcttttcaaacgtgtattagcagaattttggcaaattaaatataaaaattcgagatcctttataaaaaggtatatttaaaattccctaagtaagggttatattaagtaacagaacgttttcggattaaaaaatccaccatcagtgttacaaaaaaaaaatagcatgcctgaggcaccgaaatgttacgggtaaaaaccctttaaatgttgacagttgttgtcttatactatgatgttgctaatattcctggatattacccagggcaacacaggactcttcccacgcggttggaatttgagaatttcaatcacgaatttgacacttccaaaatacgtaaagttttccacatctttaatctgcatgttgtgaatagtaaatagagtgtcgttccttgcattggttctcatggacttgattttactaatattaattttcaaatctattttattggcttcagtggaaagtgaattttgaaaaaaaatctgctaaaaatagtttaaaaaatatttttttttagttgtgacactatacagataaaataacgaaaaatttacgaaataatatttatcaaaagtggctcttgcagtacagaatataatatcattattattatctagttaatagactcgtactttttaacgatgtaactttaaaaacaattaacaacgttaaaaaaatactgcaaaaaggaagataaataagtgataaatgtgtcacttttcttgagcactacgcagattgtttggaataaagctatcacgtattatactgtgtaaactccacaaacgacactttatacacatcttagatgaacaaatgcctggcacaagtcgatatgtgacactgtttatgttcggtgcaccgtcagttttggttaatcattagtgtcagctaacgaaaatactttaactataaacttgacactttttgagataagattttgtagttttattaaactgttggtgcaataaaaccgtttttaaaattttttgagttgtgacactatttgagcggaggtgcgacatgtggaaaatatttacaattatttcatatatcacttgttctatacaataaaaaaacgtcatttctaacatgatttttagtgatttctgttggtccaaaacaatttattatattatccatatatacttgttattttttatgtaatgatttttcttattcgctacacattaacgtcattttttgtttatatcaaataaaaagtaatattgtaagtaatatgtgattgtaaatcttggtcaataggttttttgtaaattaaagttattctgaactggaaaaaaaaaaaaaaaaaa

SEQ ID NO: 333 - DNA, 704 bp, Diabrotica virgifera
  misc_feature (1)..(704): RNAi target sequence
ttttgggtgtgaatctgtctatttaatttactcctcctggttaaaaaataaacattagtagattatatctagggtgctcggtaaaaggagtataagtcaaaaatggtcaaaatattatttttgcagaataagactataaaggactatatctttaccttggtatcaatagaacaagtcaatatgctaacataaattaaatcaaattaattggtctttttagtacaactacttaaatgaacttttaatttggtaacaacagtttatgtcaacttatactgtttatacacttcgagtttgtgaactattcttggctctaatagtacatgtcgacatatgtactgttttgaccattgatactgaataatatccaagtaagacggtcgacttatactaagacgatcgctttcagatacgtgtgtcaagcttactaagcaaatattactcttttctgtacgagattttcaagaaacaactgataactattcgcgtttggctgataactaaaccgtgggaattttaccaattaaagattacacttaatagggacagcgagaataagtaatactaacttcttacgtaggtttaatttgataaaaatagatgagtaagtggtttattttctggaccactgtgcaatatgggtgatcgtaacaaacgtgttgcatatattgttagccttatagactccgaaccacctaaaatca

SEQ ID NO: 334 - DNA, 24 bp, Artificial Sequence
  primer
  misc_feature (1)..(24): forward primer
ttttgggtgtgaatctgtctattt

SEQ ID NO: 335 - DNA, 22 bp, Artificial Sequence
  primer
  misc_feature (1)..(22): reverse primer
tgattttaggtggttcggagtc

SEQ ID NO: 336 - DNA, 737 bp, Diabrotica virgifera
  misc_feature (1)..(737): WCRW transcript ta41917.001_diavv
gggattattctagtgacttttttgggtgtgaatctgtctatttaatttactcctcctggttaaaaaataaacattagtagattatatctagggtgctcggtaaaaggagtataagtcaaaaatggtcaaaatattatttttgcagaataagactataaaggactatatctttaccttggtatcaatagaacaagtcaatatgctaacataaattaaatcaaattaattggtctttttagtacaactacttaaatgaacttttaatttggtaacaacagtttatgtcaacttatactgtttatacacttcgagtttgtgaactattcttggctctaatagtacatgtcgacatatgtactgttttgaccattgatactgaataatatccaagtaagacggtcgacttatactaagacgatcgctttcagatacgtgtgtcaagcttactaagcaaatattactcttttctgtacgagattttcaagaaacaactgataactattcgcgtttggctgataactaaaccgtgggaattttaccaattaaagattacacttaatagggacagcgagaataagtaatactaacttcttacgtaggtttaatttgataaaaatagatgagtaagtggtttattttctggaccactgtgcaatatgggtgatcgtaacaaacgtgttgcatatattgttagccttatagactccgaaccacctaaaatcactagaaaaaggacc

SEQ ID NO: 337 - DNA, 221 bp, Diabrotica virgifera
  misc_feature (1)..(221): RNAi target sequence
aatgaaaaacataataacggaagccaaaaaattccgacttaaaataaatgaagaaaagacaaagtatatgataatgggagagatccaaaaagaaaaagagaataacatcatagtacaaatagatggagaaaaaacatactcgttcaaaagagccaaagaaattatttacctgggagccaaaatagatgaaaatggtcatgaagaaggggagataaaggcaa

SEQ ID NO: 338 - DNA, 24 bp, Artificial Sequence
  primer
  misc_feature (1)..(24): forward primer
aatgaaaaacataataacggaagc

SEQ ID NO: 339 - DNA, 20 bp, Artificial Sequence
  primer
  misc_feature (1)..(20): reverse primer
ttgcctttatctccccttct

SEQ ID NO: 340 - DNA, 3813 bp, Diabrotica virgifera
  misc_feature (1)..(3813): WCRW transcript ta03247.005_diavv
cttagcgagatgcgtagagagcagaaagaatatagagatgaaataagagagctacgccaggagaatgtaacattaagagaagaaaacacgaaactaaaacaggcagtttatcaaatagaagaacggcttgaaagtttagaaaatcaaaaaaggcggaaaaatataattatacaaggattgaacatagatacaaatgggccagatatcctaaaacatgcaatgaaaaattttatgcagacagaattaaaagtagatgtacaaatagagaaggctctgaagttaggagaaaaagtttgtctggttgagcttgaaaaggaagaagataaaagaaaaatcatgcgaaacaaaaccaaattgagaaatcgagaagaaggtctagtttatatcaacgatgacctatcaaagaacgacagaattgtacagaaacatgtcagacaaaaagcgcaagaactaagaaaggaagggagaaaagtgaaagtagggtataagaaaatatatgccgatcatgaaatatggcgctgggatggaatgaaccaaacgttggtggtagagaccaaagcaaaaaactaagcaatagcaatgaaaggaaacaaatgacgacgaaaaatgcaaagaataggattacgaactatggaaatagaaacaaatcaagacagcaataaaaaagaaaagccgaaaaatgacaagatacagtttgcaacagggataaataagacggaaacgacgcaggcaatggacaaggcaataagtaaagataacaaaaagaaaactaaagtcaacttgggtacatggaatgtaagaggcacatacgaaacaggaaaactcaaagaattaattagagaaattaaaagatataatgtagaaataatagctttacaagagacaaaacaattggaaacagaaatagtagaaatagaagacgtggtattttttaaaagcgggggagaaaccagaaggttaggaacaggttttataatacagcgaaaatggaaggaaagagtaatggcattccaaccaatatcagatagattatgcacaataagattaaaaggggacaaacgaaacataagtataataaatgtacacgcaccgattgaagatgccacagaagaagaaaaagatgaattctacgagcaattggaaagagaatatgataaattaccagggtttgacatcaaaataataatgggagactgcaacgccaaagtcggaagagagaatatatacgaacacataatagggaaatatagtaagcatgaggtgtcgaacgataatggccaaagaataataggctttgcaacagaaaggcaaatggtgatacgaagcacacaattacgccgaaaagatatatataaaggaacgtggatttcccctgataagaagacagtaaatcagatagaccatattttaatagagaagaagcatgcaaacaatgtaataaatgtaaagagcatgagaggagcggactgtaactctgaccactacctggtgagagcagaatataaaatcgagcataacataaagcgaaacaataaaacaacagaaaaaattggaaaacaatttaacataggactactaaaagataacaacacacagaagaagtatgaacagggaataaccaacagactaatcagggaacaagaaacgtcaagcccagacaaacaatggcaaaatatcaaagaagcaatcttgaacacaagtaaagcaatcctagcgaaaaccaaaagaaaacacaaaacaaaagattggtatgatgaagaatgtcaagaagtagcagaagcaataagaaaggtaagactcaaaaatctcacaaatgacgaagaaagcactagagaagaatacagagaattgagaaaaatcatgaaaagaaaatgtagaagcaaaaagagaaaatacaacgagaacaaactgaaagaaatagaagaaaaatttcaaaaaaaagaaataagatcattctaccaggaagcaaaaaaaatggaaagaggatatcaaaaaaacaacccatatatgagagatgataaagggatgttgctaaatgagcctgaaaaaataatggaaaactggcaaaactatttcacagaactgctaaataagagcgaagtacaaaaggaaacaaaccatgaaattgaagatgatcagatagcaatagaaatacccacagaacaagaaataaagaacgaaataaagagcttgaaaaataacaaaagcccaggaataacagaaatatcggccgaaatgataaaatcaggagggaaaagactacagaaagagatatatgacctgataaaaagaatatgggaagtagaaaaaatgccagaagagtggaccatagcaagaatatgccctatacataaaaaaggtgatagaatgctatgcgaaaactacagaggcatcgcactattagaaatagtttacaaaatcttggcacaaagtataagtaaaaggctaagtcattattcggaaaaaatactgggggaataccaggcaggttttagaaacaacagatcaacgactgaccaaatatttgccttaaaagaaatacagactacctgttacgaacataaaacagtactatatgctttgttcatagactttaagcaggcttacgacacagtaaatagacagcagatgtacgaactgatgaaagaattggggataccaagtaaaattgtcaggatgataaagatgacgatggaaaacacaacaaacgaaatagcttggaaagggtatacatccaaaaagtttgaaaccaaggaaggattacgacaaggagacccactatcaacaatggcattcaatctaacattggaaggaataatcaggaaaagcagaataaacatgcaagaaacgatatttaaaaacggccaccaatgcatagcatttgcagatgatctgacgctattagcaacaagcaaaaaagaactacaaaagttaatgaaaaacataataacagaagccaaaaaattcggacttaaaataaatgaagaaaagacaaagtatatgataatgggagagatccaaaaagaaaaagagaataacatcatagtacaaatagatggagaaaaaacatactcgtttaaaagagccaaagaaattatttacctgggagccaaaatagatgaaaatggtcatgaagaaggggagataaaggcaagaatagctaaaggaaataaaaaatatggagcattacgcacattattgaaatccaaatacgtatcaagaaaaacaaaaataagaatttataagactgttatcagacctacagtaacatacgcatgcgaaacatgggtgctcaaaaagtcagaaacagaccttttagaaagatgggagagaaaaatgcaaagagcaatatatggaggtgtgaaaatagaaggtcagtggagaagaagaaccaataaagaattggaagaactatatcaagagccaacgattacgacgacgatcaaagcacagagaatacgatacttggggcacatcgagagaatgggaagtaaacgaatgccaaaaatggtactctcacgaagaccaatacaaaagaggaggaaaggcaggccaaggaaaagatggaaggacagtgtatatgaagacttgaagaaaagtaacattgagagatggaaagaactagcattggacagaaggagatggagagaggtggtgaaggagtgtataaaaaaactgaagtgtaattaaataaaatttataagttatgtaagttatattaagttataaacaatataacccaaggaataaaaaacctaaacagcttaacaaaaaaaaaacaaacactattgccctgaacaaaaaaagttttat

SEQ ID NO: 341 - DNA, 656 bp, Diabrotica virgifera
  misc_feature (1)..(656): RNAi target sequence
tgcaagtaatcatggcttcagagagatatagcttttctttaactactttcagcccctctggaaagttggttcagattgaatatgcattagccgctgtagcggcgggtgctccatcagtaggaattaaagcatcaaatggtgtggttattgcaacagagaacaagcacaaatcaattctgtatgatgaacacagtgtccataaagtagaaatgatcacaaaacacattggtatggtttattctggtatgggtcctgactatcgccttcttgtgagacaagcacgcaagatggctcagcagtattacctagtataccatgaacccattcctacagtacagttggtgcaaagagtagcgactgtaatgcaagaatacacccaatcaggaggagttagaccatttggagtgtcgctactgatttgtggttgggataacaacagaccttacttgttccaatgcgatccttctggagcttactttgcttggaaagctactgcaatgggaaagaattatgtcaatggaaaaacgttcttagaaaaaaggtacagtgaagagctagaactcgacgatgctgtgcacactgctatccttaccctgaaagaaagttttgaaggccagatgacagctgacaacatagaagttggtatttgcgatgct

SEQ ID NO: 342 - DNA, 22 bp, Artificial Sequence
  primer
  misc_feature (1)..(22): forward primer
tgcaagtaatcatggcttcaga

SEQ ID NO: 343 - DNA, 22 bp, Artificial Sequence
  primer
  misc_feature (1)..(22): reverse primer
agcatcgcaaataccaacttct

SEQ ID NO: 344 - DNA, 857 bp, Diabrotica virgifera
  misc_feature (1)..(857): WCRW transcript ta03948.001_diavv
ggtcaaacatcaaatccacaagtcatcaacacgaagaggaaagttgaaaattgtgtttgtaattgcaagtaatcatggcttcagagagatatagcttttctttaactactttcagcccctctggaaagttggttcagattgaatatgcattagccgctgtagcggcgggtgctccatcagtaggaattaaagcatcaaatggtgtggtcattgcaacagagaacaagcacaaatcaattctatatgatgaacacagtgtccataaagtagaaatgatcacaaaacacattggtatggtttattctggtatgggccctgactatcgccttctcgtgagacaggcacgcaagatggctcagcagtattacctagtataccatgaacccattcctacagtacagttggtgcaaagagtagcgactgtaatgcaagaatacacccaatcaggaggagttagaccatttggagtgtcactactgatttgtggttgggataacaacagaccttacttgttccaatgcgatccttctggagcttactttgcttggaaagctactgcaatgggaaagaattatgtcaatggaaaaacgttcttagaaaaaaggtacagtgaagagctagaactcgacgatgctgtgcacactgctatccttaccctgaaagaaagttttgaaggccagatgacagctgacaacatagaagttggtatttgcgatgctaatggattcagaaggtttgatccatctactgttaaggatttcttagctaatattccttaaatttttttatagtttcgattttttaatattacttggattattaaatttactataagtatcaaaaaaaaaaaaaaaaaa

SEQ ID NO: 345 - DNA, 512 bp, Diabrotica virgifera
  misc_feature (1)..(512): RNAi target sequence
acattcttaaacccggagacaaagtaggagcttccgaagccacattactcaacatgttaaacatttctcccttctcatatggtcttcaagttgagcaagtctatgactcaggcactgtatttgctccagctattttggacatcaaaccagaagatttgagggagaaattcttggctggagtagccaatttggctgctgtttgtttgtccattggacacccaacagttgcttctgctccacacagcattgccaatggattcaagaacttgttggctattgctgctgttactgatgttgacttcaaggaagccaagaccatcaaagaatacatcaaggatcccagcaaatttgctgctgctgctcctgtagctgcagccgccgctgcaccagctgccgagtctaagaaagaagagaagaaggaggaatctgaaagtgaagatgacgatatgggcttgggtctctttgactagaaagttttatatttttgatacgttatttgctgttttgtcgag

SEQ ID NO: 346 - DNA, 22 bp, Artificial Sequence
  primer
  misc_feature (1)..(22): forward primer
acattcttaaacccggagacaa

SEQ ID NO: 347 - DNA, 22 bp, Artificial Sequence
  primer
  misc_feature (1)..(22): reverse primer
ctcgacaaaacagcaaataacg

SEQ ID NO: 348 - DNA, 1042 bp, Diabrotica virgifera
  misc_feature (1)..(1042): WCRW transcript ta20424.001_diavv
  misc_feature (427)..(427): n can be any nucleotide
atacgagtccctaaccacttcaaagatgggtagggaggacaaggctacttggaagtcaaaatacttcaccaaacttatccaattgctagaagactacccaaagtgtttcattgtgggcgctgacaatgtcggctcaaaacaaatgcagcaaattcgtatttcattgcgaggaaatgctgtcgttcttatgggaaaaaataccatgatgcgtaaagctatcaagggccatattgaacacaaccctgctctggaaaagatcttgccccacatcaagggtaatgttggttttgttttcacccgaggtgacttggttgaaatcagagacaaactattggaaaacaaagtcaaagcccctgctagagctggtgccattgctccattatctgtcatcattcctgcccaaaacactggattgttccctgagaanacttctttcttccaggctttgagtagccccaccaagatttccaagggtactattgaaatcatcaatgatgtccacattcttaaacccggagacaaagtaggagcttccgaagccacattactcaacatgttaaacatttctcccttctcatatggtcttcaagttgagcaagtctatgactcaagcactgtatttgctccagctattttggacatcaaaccagaagatttgagggagaaattcttggctggagtagccaatttggctgctggttgtttgtccattggacacccaacagttgcttctgctccacacagcattgccaatggattcaagaacttggtggctattgctgctggtactgatgttgacttcaaggaagccaagaccatcaaagaatacatcaaggatcccagcaaatttgctgctgctgctcctgtagctgcagccgccgctgcaccagctgccgagtctaagaaagaagagaagaaggaggaatctgaaagtgaagatgacgatatgggcttgggtctctttgactagaaagttttatatttttgatacgttatttgctgttttgtcgagtcagactgtcaaataaatgaaacaggtcgc

SEQ ID NO: 349 - DNA, 700 bp, Diabrotica virgifera
  misc_feature (1)..(700): RNAi target sequence
  misc_feature (471)..(471): n can be any nucleotide
ggggagtacaatgtcggctaccagactggagaacggtgcgggtgattatattcaaacagaattgatatcgggcatcgatttcgttaataaaaacaattctaaaggacattgcgccaatggagaaactgggttaaatgaacacactaaatacaagaatggatttaaaaagtcggtcatttccaatggacatgtcacatcatcagacgaagaaacgacaaaaaataggacaaaaaatggttacaaaacagacacatcaacagacgaaccaaaaatccgacaaatcaaagaatccttcgaaccgcctacgttgatcaccaaagcactcacccacatcagtttctacatcctcatgttcttaggatacctcagccaggcgctgtttccacctaagttggtcaaagaaaaaaaatcgggaaggctatcgaccgttgtctgatcgttttgccgctttctattcccagtacgtctacnggcgtatcaaggattgttggaacttacccatttgcagcgtaccaggggatgaagtcgtacttaaagataggattacgagagatcattgctggacctttgaatttacggggtccaaaacgaaatgcataaatttggcttcctacaactacttggggttcgcagaagccacaggtccctgcgcagaacatgcgattcggacgatttacacggatggcattagtaccggaag

SEQ ID NO: 350 - DNA, 18 bp, Artificial Sequence
  primer
  misc_feature (1)..(18): forward primer
gagtacaatgtcggctac

SEQ ID NO: 351 - DNA, 21 bp, Artificial Sequence
  primer
  misc_feature (1)..(21): reverse primer
cttccggtactaatgccatcc

SEQ ID NO: 352 - DNA, 2113 bp, Diabrotica virgifera
  misc_feature (1)..(2113): WCRW transcript ta00669.001_diavv
ggggacagacaccagccgcagacctccaggcatgcgcttattcagcaaggtggtgtgactgctgtgagatggctgtgtcggctgtacgaaattacaggttagattaggtttgggttgggagttttctttgatttgttcgtgtgttgtgcctaaaaacttcagtacaatgtcggctaccagactggagaacggtgcgggtgattatattcaaacagaattgatatcgggcatcgatttcgttaataaaaacaattctaaaggacattgcgccaatggagaaactgggttaaatgaacacactaaatacaagaatggatttaaaaagtcggtcatttccaatggacatgtcacatcatcagacgaagaaacgacaaaaaataggacaaaaaatggttacaaaacagacacatcaacagacgaaccaaaaatccgacaaatcaaagaatccttcgaaccgcctacgttgatcaccaaagcactcacccacatcagtttctacatcctcatgttcttaggatacctcagccaggcgctgtttccacctaagttggtcaaagaaaaaaatcgggaaggctatcgaccgttgtctgatcgttttgccgctttctattcccagtacgtctacaggcgtatcaaggattgttggaacttacccatttgcagcgtaccaggggatgaagtcgtacttaaagataggattacgagagatcattgctggacctttgaatttacggggtccaaaacgaaatgcataaatttggcttcctacaactacttggggttcgcagaagccacaggtccctgcgcagaacatgcgattcggacgatttacacggatggcattagtaccggaagtaccagacaacagtacggaacgtgtgcactccatgacgaactggagcagctgatagccgaattcgtaggtgccgaagattccatcacctttggaatgggtttcgcgacgaactcactcaacattccaacactcgcatcgcctggttgtctgatattgagtgacgaaaagaatcatgccagcttgatattgggtatcaaacttaatcatcccaccgttagagtatttaaacacaataatgttaagcatctagaaaaactcctccaagaagccatctactacggccaacccggccaacccaacaacgagtacaaaccttggaagaaaatcattatttttatcgaaggcgtgtatagtatggaaggaaccataggccgccttccggaaattatagctcttaagaaaaagtacaaagcttatttatatttggacgaggcccacagcataggggccatgggcaagcacggcaaaggtgttgtagattatttcaactgtgatcccaaagatatcgacattttgatgggtacgtttacgaagagttttggaggcgcgggaggatacattgcaggttcaaaggaattcatatctttcattcgcgaacatagtcacgcgtctggtcacgcttgggcgatgtcgccgccagtcgcagcacagatcatatcagttctaaagataatcatgggcaaagatggtacaaacgaaggacaaaagagaatcgaaaggttagctaggaattccagatacgtcaggttgcgtctcgaacagatgggtttgatcgtacacggtaaccaagattctccagtagttcccattttagtttatcgttactcaaacgtagcggtagtggtaagaactttaattaaagaaaaaatagcaacagtaggcgtaggatatcctgcaacgccgcttgcggaatgcagaataagaatctgcatatcggcgggccacacgaaagagcagctggattatgccttatcagttatagaaaaagtagcagatgaaataggtattaagtattctagaaaaccgagagatccaaaaccgattgattacaataaaatcaaaatatatcaggatttgttttagagagagacttttagatgaagcttcaagagaacaccagcctgcgataggaggttttgttgtttttataaattttataaatgcatttaatatttgatttcaaaagctatttattaagaatcgtttttggctctgttttattttaatactttgcaaaataaaatataaaaacagaaa

SEQ ID NO: 353 - DNA, 440 bp, Diabrotica virgifera
  misc_feature (1)..(440): RNAi target sequence
gggtaatgaaagattccgttgtccagaagccctcttccaaccatcctttttgggaatggaagccaatggtatacatgagactacctacaattccatcatgaagtgtgatgttgatatccgtaaagacttatatgccaatactgtactctctggaggtaccaccatgtaccctggtattgctgacagaatgcagaaagaaataacctccttggcacccagcacaatgaaaatcaaaattattgctccaccagaaaggaaatactctgtttggattggtggttcaattttagcctctctttctactttccaacagatgtggatttccaaacaggaatatgatgaatctggaccatccattgttcacaggaagtgcttttaatttttatctatgtttaagtatattctttatatatcttgttttttatatcccccatcttggg

SEQ ID NO: 354 - DNA, 20 bp, Artificial Sequence
  primer
  misc_feature (1)..(20): forward primer
gtaatgaaagattccgttgt

SEQ ID NO: 355 - DNA, 21 bp, Artificial Sequence
  primer
  misc_feature (1)..(21): reverse primer
cccaagatgggggatataaaa

SEQ ID NO: 356 - DNA, 1465 bp, Diabrotica virgifera
  misc_feature (1)..(1465): WCRW transcript ta15851.001_diavv
ggagggcattccagtcttgtgatatttagtgcttacttggtacagcagtttcagtgctgtgctttagaataatttattttttaacatttatatagaaatcaaatactaaccaatcaacatgtgtgaagaagaagttgccgctttagtcgtagacaatggatccggtatgtgcaaagctggttttgctggggatgatgcacctcgtgctgtattcccttcaattgttggacgcccaagacatcagggtgtgatggtaggaatgggacaaaaagattcctatgtaggtgatgaagctcaaagtaaaagaggtatccttaccttaaaataccccatcgagcacggaatagtcacaaactgggatgatatggagaaaatttggcatcatacattctacaatgaactcagagtagccccagaagaacaccctgttctgttgacagaagctcctctcaaccccaaggccaacagggaaaagatgacacaaataatgtttgaaactttcaacaccccagccatgtatgttgccatccaggctgtactctccttgtatgcatctggtcgtactactggtatcgtattggattctggtgatggtgtatcccacactgtcccaatctatgaaggttatgcacttccccatgcaatccttcgtttggacttggctggcagagatttaactgattacctcatgaaaatcttgactgaacgtggctactctttcaccaccacagcagaaagagaaattgttagggatattaaagaaaaactctgctatgtagctttggacttcgaacaagaaatggcaacggctgctagttccagttcccttgaaaagagttacgaacttcctgatggacaagtcatcaccattggtaatgaaagattccgttgtccagaagccctcttccaaccatcctttttgggaatggaagccaatggtatacatgagactacctacaattccatcatgaagtgtgatgttgatatccgtaaagacttatatgccaatactgtactctctggaggtaccaccatgtaccctggtattgctgacagaatgcagaaagaaataacctccttggcacccagcacaatgaaaatcaaaattattgctccaccagaaaggaaatactctgtttggattggtggttcaattttagcttctctttctactttccaacagatgtggatttccaaacaggaatatgatgaatctggaccatccattgttcacaggaagtgcttttaatttttatctatgtttaagtatattctttatatatcttgttttttatatcccccatcttggggcaagaactgcctatgttatatgagtgatcttgtgatttattacacgttcagcataagacttaatgagctttaattttaagaagtgtaagttgaatactctgtttcatatttattttacctttgtaatataataaacaaaaaaaaaaaaaaaaaa

SEQ ID NO: 357 - DNA, 600 bp, Diabrotica virgifera
  misc_feature (1)..(600): RNAi target sequence
gttcgctagttccgtagtgtgttgtgcacatttaacatcgttctggcctgtagatactcctaataacttaaaaaatggcagatgacaaacaccccgtctatggacccttctttggagtcatgggagccgcggctgctatcattttcagttcgctgggcgccgcctatggtacggcaaaatcaggaaccggtattgccgctatgtcggtcatgaggccggaacttatcatgaaatgtattatcccagttgtcatggcgggtatcattgccatctacggtctggtcatagctgtactgatctctggtaacatccaagacagctctacatattcattgtacagtggttttgtccatttgggtgctggtctttcagtaggattttcaggattggcggcaggtttcgctattggtatcgtaggtgacgctggtgtaagaggtaccgcacaacagccaagactcttcgtaggaatgatcttgatcctcattttcgccgaagtattaggtctttatggtctcatcgtcgccatttacctctatactagagcttaagcgcccagctcccctaaattttcatctcctaaacacagcgtaccaaaagttg

SEQ ID NO: 358 - DNA, 23 bp, Artificial Sequence
  primer
  misc_feature (1)..(23): forward primer
gttcgctagttccgtagtgtgtt

SEQ ID NO: 359 - DNA, 22 bp, Artificial Sequence
  primer
  misc_feature (1)..(22): reverse primer
caacttttggtacgctgtgttt

SEQ ID NO: 360 - DNA, 2938 bp, Diabrotica virgifera
  misc_feature (1)..(2938): WCRW transcript ta15854.001_diavv
ggacctgaaattggcggatcgtcatatgggggattcttgcggggggcagtcgtgtaagccatgggggtcagtgggttcgctagttccgtagtgtgttgtgcacatttaacatcgttctggcctgtaaatactcctaataacttaaaaaatggcagatgacaaacaccccgtctatggacccttctttggagtcatgggagccgcggctgctatcattttcagttcgctgggcgccgcctatggtacggcaaaatcaggaaccggtattgccgctatgtcggtcatgaggccggaacttatcatgaaatgtattatcccagttgtcatggcgggtatcattgccatctacggtctggtcatagctgtactgatctctggtaacatccaagacagctctacatattcattgtacagtggttttgtccatttgggtgctggtctttcagtaggattttcaggattggcggcaggtttcgctattggtatcgtaggtgacgctggtgtaagaggtaccgcacaacagccaagactcttcgtaggaatgatcttgatcctcattttcgccgaagtattaggtctttatggtctcatcgtcgccatttacctctatactagagcttaagcgcccagctcccctaaattttcatctcctaaacacagcgtaccaaaagttgcgcatctcgccccgatcattttgtttttaatgtctacatgtaaaaataaaaactgtataaatggtagcaggcgatgaaagtgactgaggcgggcaatgtaaataatttagttatgatggggcccgtatttttcgcgtacggggcaaaacaaattaataattttagtaaaaaagactgggcctcttcatcgctgctgtgtccacacacacgactaataattccttatttccatattcatggaaccggtcgagttttcttgacaggtttttgtattaaaacgaattttcttcctaggcaaaataaaggtcttagttactaataggttgttcaaatgaaaatgtacgaaacgacactgtgggtataaatgaagtctttattcaaagtattcaccatttacctgagcacaacgatgccgttgattagccgaaggattcattgatcccagaactcctgtgaccatgaacagtcttccccgtatacatccggcgttgaatagcaactggtttaactaacaccttccgccgtcagaaacctgataacgcctcacgaattttgcaacatgaaccccatgatgtgcccacacgaactgtcgcgtcaattgaacggctctcttataagagcctctattctctcctgcgcatgcgggcgcccgggaatgccccgatcgaatccgaaggctacatttgcctccctggatgtctcactacgttatcccataacggcataggcaattatgtttgcggttaagttgttacgacgtttcgtgccttttcatttgatcagtcgcagtataatatacaagagaagagggaaaacaaattttgatttattttgcctcgtacgttacaatacctgtgctatcattgtaaataattttaaacatacttagaagcctctatttcattttcatggcgggtcaccactattattaaattaattgtatagttagtagaatttaggttaccgtttttcttttaatataaaagctagactctattgagcctaggaagtatttgaataaagttaaaaaagtagcacaatttatttttaatttcacaaaaatactgtacatttgttttatcattagtgtgttatacttgatatatcattttcatggccttacgaaggcttggtctctttatacaacaaatggttcgggaatgttatttttgacaatttttttgaatagcaagttttaagccagtaaaactgtggtattttttttcaatgcatcatcttttttaataaaaaaaactttggttaatggggcattacatcgcaaaaccgtaatttctaaataatatcgtcttaatttatttatctaacaatgtactgtctaaataacattcgtaaaccctgtacatttttttaatagtcaatttttatttgttcccatcctcatcagttttgcttacctttttttctctctcaaaaatatgatttcaaaataatctatgttccattaccttccaaaaataatataaaacggttttattatatcagcattgttgtaaatatgacaacttatgtgtatcgatggtttttttgatgtccatagctgtacgtgttagcctaaagtgtagtcatagctttggcaaaaaacatccccgttttcaacactgacgaaacttctatttaatagacagacggtgatgctttttgactttagcagataagaatgttatacagggttaacaaaaatgagaatactacgtctgatatatcctgtaacacacaaaatactttaaagctcagttacacgatgctaataacttgttttactggaatataaaacaccaatttacacaaggagagtactaaaagtcagtacatactcggttttagtgactcacaagtgttactagcatggtgtaactgagcctttatcctggcattccaattactggacaatgctatcatataaataccatgccatctaaataggtaatctacttgttagtcctaagagtttatcactatttaagtaaacgatgaattgaattggctgttttgtgttacaaggctagtaagttttctcttttcaagtcaaccctgtagtatctcctttttattttagtcatgaatcatcatctcagcacgaagcttgttgggcaagtgtctgccggttttcggtggattcggtccatcgaaataggcagacattgtgtcctattgttgtagagtattatattataatgtagattggttctgttgtaagaagggaacagcaaaattatgttgaaaataaataatttgtacattcc

SEQ ID NO: 361 - DNA, 525 bp, Diabrotica virgifera
  misc_feature (1)..(525): RNAi target sequence
gggatctccatcttcctttttcatttagtgtaaagcatgcctttccaaaggtttgtagaaaccggccgcgtggccgttgtatcggaaggcccacataagggcaaacttgttagtattgtagacgtaatcgaccagacaagggttttagttgatggccccaatagcaatgtacccagaggacagcttaggttaaatgaattgcatttaacaaagttccgcattaggtatccattttcagctccaactcgtgttgtaagaaaagcatggactgatgctaagattgatgaaaaatggaatgaatccgtctgggccaaaaaagtagcagccaaggaaaagagatcacaacttacagatcttgaccggttcaaacttcgtagggctcgttcacgaagaaaccacatccgtacagctactttcctttctttaaggaaggccgcatcaagaaacggtttcctctatggtaaaaagaagatggctaaaggaggtgacaaacctaaaccaagcaagaaggcgaagaaagaaaag

SEQ ID NO: 362 - DNA, 22 bp, Artificial Sequence
  primer
  misc_feature (1)..(22): forward primer
gggatctccatcttcctttttc

SEQ ID NO: 363 - DNA, 22 bp, Artificial Sequence
  primer
  misc_feature (1)..(22): reverse primer
cttttctttcttcgccttcttg

SEQ ID NO: 364 - DNA, 689 bp, Diabrotica virgifera
  misc_feature (1)..(689): WCRW transcript ta01695.001_diavv
aagaatacgaagagctactaacattacttaaataaactatagtttaagattttaatctgtcaacaactgtgatagccaggttcctttttcatttagtgtaaagcatgcctttccaaaggtttgtagaaaccggccgcgtggccgttgtatcggaaggcccacataagggcaaacttgttagtattgtagacgtaatcgaccaaacaagggttttggttgatggccccaacagcaatgtacccagaggacagcttaggttaaacgaattgcatttaacaaagttccgcattaggtatccattttcagctccaactcgtgttgtaagaaaagcatggactgatgctaagattgatgaaaaatggaatgaatctgtctgggccaaaaaagtagcagccaaggaaaagagatcacaactcacagatcttgaccggttcaaacttcgtagggctcgttcacgaagaaaccacatccgtacagcaactttccttgctttaaggaaggccgcatcaagaaacggtttcctctatggtaaaaagaagatggctaaaggaggtgacaaacctaaaccaagcaagaaggcgaagaaagaaaagcctgcatccaagaagaaataatttttagattaaatgacaatatatttgtttaaaaaacaaaaaaaaaaaaaaaaaatagaaaccatcattaactat

SEQ ID NO: 365 - DNA, 551 bp, Diabrotica virgifera
  misc_feature (1)..(551): RNAi target sequence
ggggatctttagtcagtgctttagaggccacgaagcaatttctaggatagacgaacgacgctcgcgacgacgcgctgcgacgcacacgacaaaaaaatacacaatacgacaccacgcgccattttgccattttctgtgtgtgcagtgaagtgaagtgctactaaaatcttcaaaattcaacccttctaagaaggccgatttcatgtgttctatatcgaagtaaaagagcaatagcatgggagtggcagaggatttcgctcccagcttcacgcaaaagcctcaattgaggcaggaggacgatggaaacaaactcattttcgaatgccagttactggctgctccgaaaccggaaatcgaatggtttcgaagcgatataccactttcagaagacagtagaactaattttaaaattcaatccataggcaccaacaaatttttagtagtactcgaattagatgatgttattgaaaccgacgctggcctttacaaggtcaaagcgaaaaataccatgggggaaatagcagcctccatcaatctcaactacagcccca

SEQ ID NO: 366 - DNA, 19 bp, Artificial Sequence
  primer
  misc_feature (1)..(19): forward primer
gatctttagtcagtgcttt

SEQ ID NO: 367 - DNA, 21 bp, Artificial Sequence
  primer
  misc_feature (1)..(21): reverse primer
tggggctgtagttgagattga

SEQ ID NO: 368 - DNA, 6974 bp, Diabrotica virgifera
  misc_feature (1)..(6974): WCRW transcript ta35139.001_diavv
acaatacgacaccacgcgccattttgccattttctgtgtgtgcagtgaagtgaagtgctactaaaatcttcaaaattcaacccttctaagaaggccgatttcatgtgttctatatcgaagtaaaagagcaatagcatgggagtggcagaggatttcgctcccagcttcacgcaaaagcctcaattgaggcaggaggacgatggaaacaaactcattttcgaatgccagttactggctgctccgaaaccggaaatcgaatggtttcgaagcgatataccactttcagaagacagtagaactaattttaaaattcaatccataggcaccaacaaatttttagtagtactcgaattagatgatgttattgaaaccgacgctggcctttacaaggtcaaagcgaaaaataccatgggggaaatagcagcctccatcaatctcaacttcagccccatggacgaaccaaaagaaaaacaaatagacggcctagcacccacttttgcgaagaaaccagctattcgccaagaagatgatggcaaaaaattattattcgaatgtaggatacaggccgatccccgtccaaccgtcagttggtcccacaatggcaacgctgttagcgaaggtccacgtcacaagttgaggatagataaagatggccattcatattttgcgacccttgaaataatcgatgtcacggtagaggatgctggcaaatacaaggtgaccgcaaaaaatgacttgggagaaagtaacgccacaatcagccttaactttgacagtggagatagcgctgatggctttgcgccttctttccttgagaaacccaaaatcatacctaatgagagtggcactcttattactatgaaatgtaaatgcaaagctaaacctaaacctgacgtcacgtggttccgcggaaccacagccgtcaaggaatcttccaaaattaaaatccagatcgttgatctcgaagaagacaaattcgaactgtccttagaaatcaaggatccatcggcagctgatgggggtacttacagatgccatgtgaagaacgaatacggagaaagtaatgcaaatctgaacctaaatatcgaagcagaaccagaaccagaaggagaaggaccaacgttcgtcgaaaaacccaggataacctctcacgatggaggcaaactcgttgtcatggagtgtaaagttcgtgctaatcctaaacctactatagtttggtacagagaaagcaaagaagtcacagaatcatccaaaattaagatcagtattaaacaaacagaagaagatatatattacgtcaaattggaactcaatgatccggggattgatgactctggcttgtacaaatgcaatataaggaacacacttggtgaactcaacgccaacctcaccttaaacatcgagattattcctgttatcaaagaaaaacccaaagttattaaaatcattaagaagaaaactgttattgttgaatgtaaagttctcagcaagtttgcacctgattgtacatggtttaaggaaagcgatgccgttaaagaagattcaagacatactgttcacgttgaccaagttaaagacggcgaatttactgttaaactcgaaattaatgaagttgagaaaaaagacaaaggtatgtacaaattggttgctaaaaacgaaaagggtgaggcaacttcacaagtcgttgaagtcactgagttacctccagaggagaaacccaaaggagacaagccgaaactgaccaaactaaccaatatcgttactgacgaaggaaaatcagttgattttataacttctctcaaaatcgaagacaaaacagtcaaaatcacatggtacaagaacaccactgtgataaccgaatcttcagaaatcaaaatctcttttgatggcactgtgacgcgacttagcattagtaaatgtaaagtatcacattccgctacatacaagtgcgttgccaaaaacgaatttggcgaagacgaaataagcgctacacttaaagtaaacgaagctaaagaggaagatgaagaagaagaagaatccgaagaggaggttatcgaagaaaagaaagaggaaaagaaagaagaaaagaaagaagaaaaacaggaaaagaaagttgaagagaaaaaagaagaaaaaaggtagaaaagaaagaagagaaggttgaaaagaaagtagaaaagaaagaggaaaagaaaacagaagaaaagaaagcagttaaaaagatagaaaagaaagaggaaagaaaagaagaggagaaaatgataattaagaaggacgaagaaaagaaaaaagacgaaaagattgtggccaaaaaggaagaggaaaagaaagatgttgagaagaaaataaggcgtacatcggttcaacagaacgaagaagtaagaaccgaatcacgcagaagctcaattatacaaaccgaagaaaaagttattaaagatggaaaagttagtaggaaatcttccatttcaaaagtcaatgaggagagtaagactgagtccaggcgcacatcattagtagatgacaagaaaaagataaccaaagataccaaaaaattggaaaccacaaaagaagtgtcagaagaaaagctgggagtagccgaagttaaaaagctggaaaaacctaaaagggtaataccccctaaagaagaagctcaaaagggttcgttcttgaacattcaattgaaaccagttcaatcggagggtaaaaaagctgaaaaggcgaataaacttgaagttgacttgaagaaaggagcagttgaagagaaaaagacaacagtcaaaaaatcttctgccaaaaaagaagattatgatattaatgcttgggaaaatatccctgattacgacagaccagtgttagagaaattcgaaaaacatgatgctccagaatatgctggtagagaaaagagtaaattctctaaggaaagaccatctatctcagtcgaaggaaaagaaaaagctccttctcagtcagctatatctgaacaacctagacctagccttcctcaaattaagactccagatgcacccaaaatcgaagtgagtagggaaaaaactcccgaacccagaaagaaatctctcgagcctggctcaggtccaggaagtcgtagaggatctcttattcctccagaagccatgggcagacgtgccagtcttatcatctccgatgagggaggaaaattacgtcctggggaagtgctagatccaaagcgtcgtcgtccgagctccgacgtacgtcgaccaagtttagctgaattggaggatctcgtgaacaaaccctcgactcctttgaaaccttccggtccaaagggagcagcacctcaaattgtcgatgtccaagaaaattactcctcagttgaagatcaaactgcttacattactatccaagttgagggtgatccaccaccgacattcaaattctataagggtatgactcaacttattgagggtggtagattcagatttgtaaccgatggtgaaacaaacttgatcacactctgcattagaaaggtaaagcccaatgatgagggtacctataaagttgtcatagccaacgtccatggtgaagactccgctgaaatgaccctcttcgtagctggtgctggaggtgttgatttccgttctatgctcatgaagagaaagtacgccaaatgggataaggataaggaagaccccaactggggagacttaaaagaggttgaaaaaccagtgccagcattaaaaaaagtcgaaaagaaacaagaaagtttccttaaaccattggtagatcagttcgctaaagaaggaaaagataagaaagttgtgttcgacgctggtttctcaaaaaccaactgtaaaccaaaatggctgttcaggaaagacgaacttttcccaggatctaaatacaaatttaagaatgaaggtgacgtgtaccagctgatcatcagcaatcctaaagtagaggatactggaaaatacacaattgaaatcggaggagtcagctctaccggtttcctgacagtagatgaaccagatccatgttacacctttaccaaagcactgaagaaaaaatatgatggatacaccaaacatgaagttgaactggcttgtactgtaagcagtagtttggccattgttggttggtataaaggagagacaaagttggaagataatgataaatttagtatctctaaagatattaacggagtctgtagactgactattaaagatgcgacatttgatgatgctggtgattacacctgcaaactagaaaaacaaaccgaaaagacacaaactaaagttaatattgtagactacccatataaattcgtgaaagtacttaagcatcaacaacttatagaaaaagaaaatgttacattagtatgtgagctcaacgatgctggtggtgatgtacagtggtttaagaacggagaagaaatcaaaccagataaacgagtagttatcagtaaagatggtcgcaaacgcaaactggtaattaaagacgccaaagttactgatgctggtatgtactcttgtactaccaatgcagacaaaaccgaagctgagcttattgtgaactacttgaaccgctttaacaaaaaactgaaagacactgttgctgttgaacgagaaaaactagttttggacattgaactacaagatcaaacagccccgtgcgagtggttgttcaatggcgaaccaatcaagccctctgagagagtcgagatcaaaaacttgggaggtggcaagcaccaactcatatttaatggtttagatatggcagatgacggtgaaattaagtgtgtatcaggaaaacttgaatcttccatgatgctttccgtcaaaaaaggtgaaagcaagcctgaaattgacttcccatcagacttcgctgcaccaattagcaaacctattgtccttgaagtaccatacaaaattagtggaaccagacagacacctttggaagctaaacttatcaaagacggaaaggtactacctctaaaagacgtagagacaataatttcagacgacaaagtcatattcaaaattaaaaaaccatccagagaccaatctggtccataccagatcaaattatcgaacgggcaaggtgaggatgttaaagatgtcaagatcaccatgcaggacgttcctgctccaccagaagacgttaatgtaacagatatattccaagacaactgtaaaatatcctggaaaccacccaaagataatggtggagcacctcttctccattatgttgttgaacgacaagatctcagtctcaaagctggttgggaaaatgttggtgaagtaaaagccaatgaaccaactacattcaaagttgaaaaactaattcccaagaaagaatataaattcagaatcagagctgttaaccagctaggtcctagcgaacctgctctattcggtaaaccagtattagctaaagatccttgggatgaagccagcaagcctaaagatgtagaagtagttgactgggatgttgaccacgcagacattacttggaagacacctgacagcgatggtggagctcctattactggctacgttattgaattttaaagaaaaattcgccaaagattggaaaaccggtgttgaagtaccaggtgaccaactgaaaggaactgttcctaaactcaaggaaaacagtcagtacgaatttagagtaagggctattaataaggctggaccaggagaacctagtgatcccaccaaacctatcatagctaagtgtagattcgtaaaaccatttattattggtaatgacttaaacagtattattatcaagaagggacaagttgtaaagtacgatattaagtacgggggtgaaccagaacccgaggtgcaatggttcctcgataaaaaagaaatcaaacccgacttggaagaaagagttactatcgacaaatatgacagaaacactattattacagtacgcagatgtacaagagctgacagtggaaaatatcgtttggtacttaccaacagctctggtacttgtgaaggggtggcggaagttattgttttagataaacctacaccacccaaagctatgaaagtcgaggaaatccgtgcagatcacgttaaagttgcatggcaaaaaccagaagatatgggtggtactgacctaactggttatatattagaaaaaatggatatggacacaggaagatggattcctgcaggtgaagttggtcctgatgaatcaaactttacgtttaagaacctgacacctaagaagaaatacaaatttagagttcgagctaaaaataaagaaggagaatctgaacctttggaaaccgatgactttattctagccaagaatccttacgatgagcccggagcacctggacaaccagaaatctttgactatgacaacaagagtgccagccttaaatgggctaaaccagatagcgatggtgggcgccctatcacccattacacagtcgaaatgaaagataagtttgcagctgattggactgaggtagccaagacgcctgacgctactcctgaagtggtcgtacctggtttaaaagaaaatatggtatatcaattccgtgtgaaagcacacaataaatcaggacctagtgtaccttccgcaccaacagctaaccacctctgcaaacacaaaaacttaaaaccaagaattgatcgtgaaacatttagagctgtcactataaaagctggccgtactcataagtgggcagttgactttatgggagagcctccaccatctgtcaaatgggtatggagagatgacattccattatcaaatagtgaacgtatcaagatagaaaactccgactaccatacggacttcacactcctcaacgctgttcgtaaagactcaggaaaatacacgcttactattgaaaacgttaacggaaaggatactgaaacagttgaactgactgtattgggcaaaccagcagcccctgaaggacctttagttgtatctgatgtgactgcagaaaaagctaaagttag

SEQ ID NO: 369 - DNA, 586 bp, Diabrotica virgifera
  misc_feature (1)..(586): RNAi target sequence
gggggagtagtcggtatgtatttgaatttatcttaatttgtttaatattagtagttaaatattaaactatagttagaagttgttatatatttgaccattagttgactccccaaaatgcagatcttcgttaaaaccttaacgggtaagaccatcacccttgaggtcgagccctcagatactatcgaaaatgtgaaagctaaaatccaggataaagaaggaattcccccagaccagcaacgtctcatcttcgctggaaaacaactcgaagatggtcgtaccttgtctgactataatattcagaaagaatcaacccttcacttggtgttgagattgagaggaggtgctaagaaacgtaagaagaagaattactccacccccaagaaaatcaagcacaagaagaagaaggttaagttagctgtattgaaattttataaggttgacgaaaatggtaaaatccaccgattgagacgtgaatgccccgctgaacaatgtggagctggtgtcttcatggcagccatggaagacaggcattactgtggcaagtgcggttacactcttgtcttctccaaaccaggagatgagaaat

SEQ ID NO: 370 - DNA, 19 bp, Artificial Sequence
  primer
  misc_feature (1)..(19): forward primer
gagtagtcggtatgtattt

SEQ ID NO: 371 - DNA, 22 bp, Artificial Sequence
  primer
  misc_feature (1)..(22): reverse primer
atttctcatctcctggtttgga

SEQ ID NO: 372 - DNA, 683 bp, Diabrotica virgifera
  misc_feature (1)..(683): WCRW transcript ta06472.004_diavv
ggagtagtcggtatgtatttgaatttatcttaatttgtttaatattagtagttaaataggaaactatagttagaagttgttatatatttgactattagttgactccccaaaatgcagatcttcgttaaaaccttaacgggtaagaccatcactcttgaggtcgagccctcagatactatcgaaaatgtgaaagctaaaatccaggataaagaaggaattcccccagaccagcaacgtctcatcttcgctggaaaacaactcgaagatggtcgtaccttgtctgactataatattcaaaaagaatcaacccttcacttggtgttgagattgagaggaggtgctaagaaacgtaagaagaagaattactccacccccaagaaaatcaagcacaagaagaagaaggttaagttagctgtattgaaattttataaggttgacgaaaatggtaaaatccaccgattgagacgtgaatgccccgctgaacaatgtggagctggtgtcttcatggcagccatggaagacaggcattactgtggcaagtgcggttacactcttgtcttctccaaaccaggagatgagaaatagatatatgtccttgtatattgtttaagaaaaaaatagaaaaacctttgtttatttgaataaaatattcgaggaaatatatctatttctcatctcctggt

SEQ ID NO: 373 - DNA, 611 bp, Diabrotica virgifera
  misc_feature (1)..(611): RNAi target sequence
ctccgaagacagacagtcgattttattcagtgattctgattgttcagtttttgtagttgtacagttttcgtattaggaaataaatcaaatatggcatcaggagtaactgtagcagatgcctgcaaaaaggtccatgaagaaatcaaaagggacaaaaaacacagatttgcaattttctacatcaaggatggcaaacagattgatgttgaacacataggagaaagaaatgcagagtatgatgatttcctaactaaactgcaagagggaggagctaatgaatgtcgttatggacttttcgattttgaatacatgcaccagtgccagggaacctcagagtcaaccaagaaacaaaagttattcctgatgtcgtggtgtcctgaaactgcatctgtcaaaaagaagatggtgtatgctagctcattcgaatatcttaaaaaagctttggtaatacagaaatctatccaagcgacagatttagcggaagcgagtataacagcggtagaagaaaaattacgatccactgatcgtcagtaacgccttttatttttattatttttctttttgtatctcgactgtctactcgcgcgccgacctgccgaggtgtattattt

SEQ ID NO: 374 - DNA, 21 bp, Artificial Sequence
  primer
  misc_feature (1)..(21): forward primer
ctccgaagacagacagtcgat

SEQ ID NO: 375 - DNA, 22 bp, Artificial Sequence
  primer
  misc_feature (1)..(22): reverse primer
aaataatacacctcggcaggtc

SEQ ID NO: 376 - DNA, 1099 bp, Diabrotica virgifera
  misc_feature (1)..(1099): WCRW transcript ta00957.001_diavv
gggaaatcgcgagaatacgggcgaggtttgaagtttttaattttttgttcatatcaccacttaaagctattgttatcattttagcatatataaaacaatagcttctgtgttggggattaacagtcgcggttgagctaaaaaatatatatttgttaatgttataaataatattcaaaaagtttgtttaattcaaaactggcgcatttcgtacgcatgaaaaaatagttcgaattgacattggaaacattttgatagttgtggtgacgtttgctgtaaatctatttaatttttggtgatttaataattgaaaatatttctgggaattaacgtagtttctagaaaaaatatcggtgacttattttggcgtagtaaaattgactcgcgcaggcgtacccccagctgccggtaggacaacgtccccaacagatctccgaagacagacagtcgattttattcagtgattctgattgttcagtttttgtagttgtacagttttcgtattaggaaataaatcaaatatggcatcaggagtaactgtagcagatgcctgcaaaaaggtccatgaagaaatcaaaagggacaaaaaacacagatttgcaattttctacatcaaggatggcaaacagattgatgttgaacacataggagaaagaaatgcagagtatgatgatttcctaactaaactgcaagagggaggtgctaatgaatgtcgttatggacttttcgattttgaatacatgcaccagtgccagggaacctcagagtcaaccaagaaacaaaagttattcctgatgtcgtggtgtcctgaaactgcatctgtcaaaaagaagatggtgtatgctagctcattcgaatatcttaaaaaagctttggtaatacagaaatctatccaagcgacagatttagcggaagcgagtataacagcggtagaagaaaaattacgatccactgatcgtcagtaacgccttttatttttattatttttctttttgtatctcgactgtctactcacgcaccgacctaccgaggtgtattatttatataagtatttgaatatttaataaagcttcatttataaaaaaaaaaaaaaaaaaaaaaa

SEQ ID NO: 377 - DNA, 357 bp, Diabrotica virgifera
  misc_feature (1)..(357): RNAi target sequence
aaaatgtccaagagaggacgtggtggttccgcgggagcgaagtttaggatctcccttgctcttcctgtaggagcagtaattaattgtgcagataatacaggagcaaagaacttatatgttatcgctgtacaaggtattggtggacgacttaaccgtctgccagctgcaggatctggtgacatgattgtagccacagtcaaaaagggtaaaccagaactcaggaaaaaagtcatgcctgcagtagtcatcaggcagcggaaaccatttagaaggaaggatggtgtcttcatttactttgaagataatgctggggttatagtcaataacaaaggtgaaatgaaaggatcagccatcact

SEQ ID NO: 378 - DNA, 22 bp, Artificial Sequence
  primer
  misc_feature (1)..(22): forward primer
aaaatgtccaagagaggacgtg

SEQ ID NO: 379 - DNA, 22 bp, Artificial Sequence
  primer
  misc_feature (1)..(22): reverse primer
agtgatggctgatcctttcatt

SEQ ID NO: 380 - DNA, 667 bp, Diabrotica virgifera
  misc_feature (1)..(667): WCRW transcript ta01259.001_diavv
aaggtattgtctctttaaggaatgcacagggatctaatgactggcaggctcgtttgcatctggttgcaaacgtcacgggggtctgggggctgtcaaaataagttctttcaataatacaaaatgtccaagagaggacgtggtggttccgcgggagcgaagtttaggatctcccttgctcttcctgtaggagcagtaattaattgtgcagataatacaggagcaaagaacttatatgttatcgctgtacaaggtattggtggacgacttaaccgtctgccagctgcaggatctggtgacatgattgtagccacagtcaaaaagggtaaaccagaactcaggaaaaaagtcatgcctgcagtagttatcaggcagcggaaaccatttagaaggaaggatggtgtcttcatttactttgaagataatgctggggttatagtcaataacaaaggtgaaatgaaaggatcagccatcactggtccagttgcaaaagaatgtgcagatttatggcccagaattgcatcaaatgcaagcagtattgcttgatgtgtatatgtttaagaaaaataaaataggatattgttcttaaaaaaaaaaaaaaaaaatgcgattttttatagaacctatgtaagtttacaatttattcatgaaataatgtaaaaatgacagg

SEQ ID NO: 381 - DNA, 520 bp, Diabrotica virgifera
  misc_feature (1)..(520): RNAi target sequence
ggcccaaacaactgtaagacagggtgctcaaggaggaactactgtataccccggtatgcaaaacacttacagagctactgcccgcccaccaaatcagtcaacaaccatgcgtagcaacatgagtgtacctaggcaaattactggacaacaaccacaaaatgcaattgtacctgctgctgttaacagaacagccaacttctaatacacttcaaacatgagaaatccaccacaacctttgggaggtttaccaggtgctgctgctccagtacagcaggctgtacacactcaaggtcaggaaccattgacagcaaccatgttggctgctgctccaccacaggagcaaaaacagatgttgggtgaaaggttgtttccacttatccaacgcatgtatccagacatggcaggtaaaatcactggtatgttattggagattgacaacactgagctgctacacatgttggaacaacaggagtcccttaagaacaaagtggaagaagcagttgctgttttacaagcccat

SEQ ID NO: 382 - DNA, 20 bp, Artificial Sequence
  primer
  misc_feature (1)..(20): forward primer
gcccaaacaactgtaagaca

SEQ ID NO: 383 - DNA, 22 bp, Artificial Sequence
  primer
  misc_feature (1)..(22): reverse primer
atgggcttgtaaaacagcaact

SEQ ID NO: 384 - DNA, 2656 bp, Diabrotica virgifera
  misc_feature (1)..(2656): WCRW transcript ta16449.001_diavv
cgcattttttttttttttttttgacttctgacaaatagactttttaaacctattgtgaagaaaaactattaaaaaaacaaaaaaaattgtaaaatagtgtaaaaaagtaaaaaaatatccaacgaagatgaatccggctgccccaaattatcctatggcgtctttatacgtcggcgatttacattctgatattactgaggccatgctttttgagaaattttcaaccgcgggtcctgtgctttcgattcgcgtgtgtagagacttgattacacgtcgatccttgggttatgcatatgtgaacttccaacaacctgcagatgctgagcgtgctttggataccatgaattttgacttgataaaaggtaggcctatccgcatcatgtggtctcaacgtgatccatcattgagaaaatctggcgttggaaatgtttttatcaagaatttagatcgttccattgacaacaaggccatgtacgatactttctcagcttttggtaacattcttagttgtaaggtagcccaagatgaaaacagctctagtaaaggttatgggtttgtccattttgaaaccgaagaagctgcaaataagtctattgaaaaggtaaatggtatgttgttgaacggaaaaaaagtatatgtaggccgctttattccacacaaagaaagagaaaaggaactgggagaaaaagccaagctgttcacaaatgtttatgttaaaaattttggtgaagattttgctgaggaacagttaaaggttatgtttgaaaagtatggtaaaattaccagctacaagataatgagtaaagaagatggtaaatcaaaaggatttggttttgtagcctttgaaagttcagaggcagcagaagcggcagttgaagctttaaatggaaaagagttggttgaaggaaaacctttgtatgttggaagagcccaaaagagagctgagcgtcaacaagaactaaaacgtcgctttgaagccttaaaaatggaaagacttaatcgctatcagggtgtaaatctctatgttaaaaatctagatgatacaatagatgatgaacgtctccgtaaagagtttactccttttggaaccataacatctgccaaagtgatgttggaagaaggtagaagcaagggttttggttttgtatgtttttcctctccagaagaagctacaaaggcggtaacagaaatgaatggcagaattgttggttctaagcctttatatgttgccttagctcagcgtaaagaagatcgtaaagcacatttaacttctcagtacatgcagcgtatggcaaatatgagaatgcaccagatgggtcagttcatacaaccaggtgcatctagcggttattttgttcctaccattcctgccgcacaaagattctatggaccagcacagatgactcaaattcgtgctagtaccagatgggccgcccaaacaactgtaagacagggtgctcaaggaggaactactgtataccccggtatgcaaaacacttacagagctactgcccgcccaccaaatcagtcaacaaccatgcgtagcaacatgagtgtacctaggcaaattactggacaacaaccacaaaatgcaattgtacctgctgctgttaacagaacagccaacttcaaatacacttcaaacatgagaaatccaccacaacctttgggaggtttaccaggtgctgctgctccagtacagcaggctgtacacattcaaggtcaggaaccattgacagcaaccatgttggctgctgctccaccacaggagcaaaaacagatgttgggtgaaagattgtttccacttatccaacgcatgtatccagacatggcaggtaaaatcactggtatgttattggagattgacaacactgagctgctacacatgttggaacaacaggagtcccttaagaacaaagtggaagaagcagttgctgttttacaagcccatcaagccaagcaagctgctactactcagattaagaaagagtagttgctgaagcagtgatgattttatgttttatatttttaagcataaataaaaagtacttgtgcattttcaaaaaaaaaaaaaaaaaatgcgtcaaattagctgattgtagcttaaacataatctttaaatctaatgtgtttattattacagtttttgtttagcatcaaacattgcttacatctccatattcacttcttgattattgtttaatagtttgtcatttgatttaaattatacaacaaagttaatgctttgtcatttattcagtttttgtattataaaaaaatatacaattctggaccttggaggtaaactacattatgttaacatggtgttgttttgaataagttcccttaatccacttattttattagttggattatacaaatttggttatatattattcaaatatggttacattgtttttcaaacaattgagatttttataacactcaaagtgctctactgtaatttacctccgaggtccagatatgtttttggaaatcgtcaaagtctcagtacggctagctttgctacatttgtaacacatgattaatttcatttagaatagttgattacaaaaatgccacaaggaaatagcttcagaacatttcattttttaattattataaattcattttagaaagcattatcaaattgtag

SEQ ID NO: 385 - DNA, 490 bp, Diabrotica virgifera
  misc_feature (1)..(490): RNAi target sequence
tcaggtatgccagtttattttggaagattatgtaatgtctgggcaaggagcctgggccaacatctgcgtcacacaacccagacgtatatcagccgtttcggtatcagaaagagtggctgccgaacgatgtgaagagctcggtcagtctatcggttactcagtgcgttttgaatcagctttacctaaaccgtacggatcagtaatgttctgtacagtaggagtgttgttgaaaaagttggaaaatggtcttagaggagtcagccacgttattgtagatgagattcacgaacgagatgtcaatagtgactttattatggttgttttgagagatatgatccacacatatcccgatttaagagtaattcttatgtctgctaccatcgatacaactttattctctaaatatttcaacaactgccccgttatcgaaattccaggaagagcttttcctgttaaacagtatttcttggaagatgctattgaactcacg

SEQ ID NO: 386 - DNA, 23 bp, Artificial Sequence
  primer
  misc_feature (1)..(23): forward primer
tcaggtatgccagtttattttgg

SEQ ID NO: 387 - DNA, 22 bp, Artificial Sequence
  primer
  misc_feature (1)..(22): reverse primer
cgtgagttcaatagcatcttcc

SEQ ID NO: 388 - DNA, 4007 bp, Diabrotica virgifera
  misc_feature (1)..(4007): WCRW transcript ta01430.001_diavv
gggggccacaagcacaagctaaagcgacacgccgggatttggttccggtagaaaaattcagaaaaaatctattttttcgtttaaacaagcataaaaaataattaccaaatattaataaaacatttacaatcgtggtaaacgtattttgaattcatcatgtctgatctaaaatcctttctaaaccaatggtgtcagaagaataaaaaggaaccagcttatgaagtgagacccacgggacccaagcataggcagagatttctctgtgaactaagaattgatggctacaactatgttggagcaggaaattcaaccaacaaaaaggatgcacaatctaatgcttcaaaggatttcatctctttcttggttcggcaaggaatgattaacaaaaatgaggtaccagctgatattgatgctgctcctacacctgccattcaccacggccaacaagaaatgacaggtggcgggccgcaacatcaagtgtttgagaaaggtatgggtcctgccaattttggtgaagcataccgtcctcgtggtcgagaagatggagaatggcattatatggacagagctcaagaacagaaacgaatggaagaagcagaagatttagatgtgaatgctcaaattcatggaaattggactgtagagaatgccaaatctaagctacatcaattcatgcaagccaataagattaacacggattataaatatacacaagttgggccagatcactctagaacattcgtcgcagaactcagtttctatgttaaacaacttggaagaactattcatggaagggatactggatctaataaacagactgcaagtaaaagttgtgccctatcagttgtgcgacaactttttcacttgaaagtcattgaagctttttcaggaacattaaaaaaagaaaagaagtcagcaacagaaatgcctcctttccaagtaagactaagtcctaaattgaaggatcaaatttctgactgtttgaggtcattaaacgtgactcccactccagtcacctctaatcaagtggacgataaaggcgaacctgtacccgtgtctctactaagcagccacgttttagacgactttcatcccgcaaaacccacagcggctggtgtggttccgtggtcgccacctcaaccaaactggaactgctggacaggttgtaatatagacgaagggtatttagctagtgctacgttggatgatttaagtgaacagatgcttactgattggaaacacagaacagcgaatgattcttcgctgatcactagtatgcaagacagaatgattttgccggtatatacgaagaaatcagagattatggaagctatcaacgaacatcctgttattatcataaggggaaatactggttgcggtaaaacaactcaggtatgccagtttattttggaagattatgtaatgtctgggcaaggagcctgggccaacatctgcgtcacacaacccagacgtatatcagccgtttcggtatcagaaagagtggctgccgaacgatgtgaagagctcggtcagtctatcggttactcagtgcgttttgaatcagctttacctaaaccgtacggatcagtaatgttctgtacagtaggagtgttgttgaaaaagttggaaaatggtcttagaggagtcagccacgttattgtagatgagattcacgaacgagatgtcaatagtgactttattatggttgttttgagagatatgatccacacatatcccgatttgagagtaattcttatgtctgctaccatcgatacaactttattctctaaatatttcaacaactgccccgttatcgaaattccaggaagagcttttcctgttaaacagtatttcttggaagatgctattgaactcacgaagttcgtgccacccactgataccagaaaaagaaaaaataaaggtggtaaagatgatgacgaagaagaaagtacaggcgttgaagaacctgacgaaaatttaaacaaggttgtaggaggaaattattcagatctgaccagaaacgtcatgtctagactgaatgaaaaagaagtgagttttgagcttctggaagctcttttagactacatcaaaacacaatctatacctggagctgtattagttttccttcctggctggaatttaatcttcgctatgatgaaacatcttcaaaatcaccccgtttatggaggaagtcagtacagtattttacccttacattcccaaatccctagagaagatcagaaaagggtctttcaacctgttcctgaccacgtaacaaaagtcattcttgcaacaaatatcgccgaaacttccatcaccataaacgacgtagtgtttgtgattgacagttgcaaagcaaaaatgaagatgtttacttctcacaacaatatgactagttatgctacggtttgggcttccaggacaaacttggaacagagaaaaggtcgagctggtcgtgttaggccaggtatttgtttccatttgtgttccaaggccagattcgacaaacttgacgaacatatgacaccagagatgtttagaactcccttacacgagctggctttgagcataaagctgttacgtttgggctcgataggtcatttcctgtcaaaggctattgaacctccaccattagatgccgtcatcgaagcggaagtgctattaagagaaatgaaatgtctggatcaaaacgatgagttgactcctctgggtagaatcatcgccaagcttcccattgaaccgagattggggaaaatgatggttttgggttgtgtatttatgtgtggaggaccattggctacgatggctgcaaactcttctacattccctgaaatattcacgctagacatgggccaaagacggttaagctatcatcaaagagccttatctggggacaggcactccgatcatgttgcgatgttaacagcatttgagctgtgggatcaagccagacaaggtggagaagaagcagaattaaggttttgcgatttcaaaggcatcagtatgccgactatgagagtaacttgggaagctaaacatcaactacaacaaatcttgaataatgtaggttttccagaagaaactatggcgctatttcctatggaaactgttggtccagatcccagacttgatgttgtaatgtctcttatgtgttacggattatatccaaacgtttgtttccacaaggacaaaagaaaggtattaacaacagaaagcaaagccgcacttatccacaaaacttccgtcaactgcagtaaccaggatcaaggatttccatacccattctttgtatttggagaaaaaatcagaaccagagctgtatcttgcaaacagatgactatggttacaccccttcatcttctgctgttcggttcccgaaaagtagaatgggttgataacgtggttaggttggacaactggatcaatttggacatggatcccgaggtagcttccatgatagtggctctaagacctgcgttggaaagtttagttattagaacttctcagtctccagaagcaatcttggaaatgggagaaactgacgttaaggttgtgtcaacgattaaagaaatatgcagattgcacgcaggaagttttgaactagaaagagccaaaggtagcctgcttcaatcaaataggcctcccagaggacacactctcggagggttcagtggaccttctcccaaattcttcagaggtggctttaatagtcgaggtggtggtggaggtttcagaggtggattccgtggcgatagaaatgggggcggttttggcggcggcagaggtggattccgaggtggtcgaggcggatttggaggaggcggtggtggctttggcggttcccgtggtggaagatattagatatcttataatatatatagatataacttaattactaatgtttcttaggtatttattgcattttaaaaatgactgtttccaaacaatgttttgcaatgtattagtatgacagtgtatcagttaatttaagatttagtgtttaattt

SEQ ID NO: 389 - DNA, 658 bp, Diabrotica virgifera
  misc_feature (1)..(658): RNAi target sequence
gggggacttcattccagtcttgtgatatttagtgcttacttggtacagcagtttcagtgctgtgctttagaataatttattttttaacatttatatagaaatcaaatactaaccaatcaacatgtgtgaagaagaagttgccgctttagtcgtagacaatggatccggtatgtgcaaagctggttttgctggggatgatgcacctcgtgctgtattcccttcaattgttggacgcccaagacatcagggtgtgatggtaggaatgggacaaaaagattcctatgtaggtgatgaagctcaaagtaaaagaggtatccttaccttaaaataccccatcgagcacggaatagtcacaaactgggatgatatggagaaaatttggcatcatacattctacaatgaactcagagcagccccagaagaacaccctgttctgttgacagaagctcctctcaaccccaaggccaacagggaaaagatgacacaaataatgtttgaaactttcaacaccccagccatgtatgttgccatccaggctgtactctccttgtatgcatctggtcgtacaactggtattgtgttggattctggtgatggtgtatcccacactgtcccaatctatgaaggttatgctcttcctcatgcaatccttcgtttg

SEQ ID NO: 390 - DNA, 22 bp, Artificial Sequence
  primer
  misc_feature (1)..(22): forward primer
cttggtacagcagtttcagtgc

SEQ ID NO: 391 - DNA, 22 bp, Artificial Sequence
  primer
  misc_feature (1)..(22): reverse primer
gcatgaggaagagcataacctt

SEQ ID NO: 392 - DNA, 1534 bp, Diabrotica virgifera
  misc_feature (1)..(1534): WCRW transcript ta02481.002_diavv
ggattccagtcttgtgatatttagtgcttacttggtacagcagtttcagtgctgtgctttagaataatttattttttaacatttatatagaaatcaaatactaaccaatcaacatgtgtgaagaagaagttgccgctttagtcgtagacaatggatccggtatgtgcaaagctggttttgctggggatgatgcacctcgtgctgtattcccttcaattgttggacgcccaagacatcagggtgtgatggtaggaatgggacaaaaagattcctatgtaggtgatgaagctcaaagtaaaagaggtatccttaccttaaaataccccatcgagcacggaatagtcacaaactgggatgatatggagaaaatttggcatcatacattctacaatgaactcagagtagccccagaagaacaccctgttctgttgacagaagctcctctcaaccccaaggccaacagggaaaagatgacacaaataatgtttgaaactttcaacaccccagccatgtatgttgccatccaggctgtactctccttgtatgcatctggtcgtacaactggtattgtgttggattctggtgatggtgtatcccacactgtcccaatctatgaaggttatgctcttcctcatgcaatccttcgtttggacttagctggtagagacttgactgattacctcatgaaaattttgactgaacgtggctactctttcaccaccacagcagaaagagaaattgttagagatattaaagaaaaactctgctatgtagctttggacttcgaacaagaaatggcaacagctgctagttccagttcccttgaaaagagttatgaacttcctgatggacaagtcatcaccattggtaatgaaagattccgttgcccagaagctctcttccaaccatccttcttgggtatggaagctgctggtattcatgaaacaacctacaattccatcatgaagtgtgatgttgatatccgtaaggacctatatgccaacactgtactctctggaggtaccaccatgtaccctggtattgctgatagaatgcagaaagaaatcactgccttggctcctagcacaatgaagattaagatcatcgccccaccagaaagaaaatactctgtatggatcggtggttccattttggcctctctatccaccttccaacaaatgtggatttccaaacaagaatatgatgaatctggtccatccatcgtccacagaaaatgcttctaatttgtttttgtccgcatttatattctttatttctatttacataagcccgcccattttccgggcgcgaactgccgtgtttatcgtatgggatcgagaccataaaatatccacactaggccaaagtattactatcttaatttttgtaatttattacctgtgcaaagtaagactattatattattaggctaatactatgggaaaataaaaaaaatagtaaaactcaaaaaaaaaaaaaaaaaatcagtttacctttctaataaaataaataaaacaaaaaaaaaaaaaaaaaa

SEQ ID NO: 393 - DNA, 601 bp, Diabrotica virgifera
  misc_feature (1)..(601): RNAi target sequence
tgctccaagatgaaggtactcattcttctttccgttgttgccttgagcagctgcttaccagcatccagaaatcaacaatacgttgatgcagactacaacagctacaacgctcatcccgtctacaacttctggaggacttggaatcagcaacactatggacaagaaccatggaaccaatgggtacaatatggtgtccagaaccaacccggtaactactggaggcagtacgtgcaacgcagcaaccaagctgaaaatgtcgatttaccttggatgtatcactcttgggatgtccaggatgtgcaaaacttaactcccgttcaacgtgttcagttgctactcaactacgtcagacttcaccaacaatggaaccaatggactcatgatgtaactgccaatgaacgtcttcagaatatgttgtatcaacaccttcctgaacacttatggagctccaacgagcaaattgtaccatacatgatgaactacttcaaccaatacccaatgaaatacaacgacattatgcatgaagttatgcaaaccccatgggctcaccaacaacttatgttccacgttatgtctgaattataccagcacttcggtcaag

SEQ ID NO: 394 - DNA, 22 bp, Artificial Sequence
  primer
  misc_feature (1)..(22): forward primer
tgctccaagatgaaggtactca

SEQ ID NO: 395 - DNA, 22 bp, Artificial Sequence
  primer
  misc_feature (1)..(22): reverse primer
cttgaccgaagtgctggtataa

SEQ ID NO: 396 - DNA, 1208 bp, Diabrotica virgifera
  misc_feature (1)..(1208): WCRW transcript ta08003.008_diavv
ggggggacatttcagtacactgctccaagatgaaggtactcattcttctttccgttgttgccttgagcagctgcttaccagcatccagaaatcaacaatacgttgatgtagactacaacagctacaacgctcatcccgtctacaacttctggaggacttggaatcagcaacactatggacaagaaccatggaaccaatgggtacaatatggtgtccagaaccaacccggtaactactggaggcagtacgtgcaacgcagcaaccaagctgaaaatgtcgatttaccttggatgtatcactcttgggatgtccaggatgtgcaaaacttaactcccgttcaacgtgttcagttgctactcaactacgtcagacttcaccaacaatggaaccaatggactcatgatgtaactgccaatgaacgtcttcagaatatgttgtatcaacaccttcctgaacacttatggagctccaacgagcaaattgtaccatacatgatgaactacttcaaccaatacccaatgaaatacaacgacattatgcatgaagttatgcaaaccccatgggctcaccaacaacttatgttccacgttatgtctgaattataccagcacttcggtcaagccccatggtcccacgaacaaataatgaaccagatcatgcaacaccaatacctctacggtacaaccttatcccaacaacaactccaacaattggtagaattcgtactccacattcaatacgaacttactcctttacattaccaacaacttgaacaagttcaaccctggaaccgtgaacaagtactttcatggaaccaaggacaagtactcccatgggcctacagacaacttcttccattgaactatgaaaccgttttaccatggacccgccagtattccgcacaaaacaacatgaacctagagtcccaatacaactacaatctccaccaacaacaaatgccattgtcccaatactggaaccagagatacggacaacaatacccacaacattatgaagccatggaacaacccggatggtggaaccaagaatggacccaaaacttggttggacaagagaatcattatcctctcttggggcaaaatatgcccttagtatattaaaaagtattctgttctaagcatatgatttaaaataaaaaaaggcatatatacttgttagttttatttttaacccgtatacaaagagtt

SEQ ID NO: 397 - DNA, 600 bp, Diabrotica virgifera
  misc_feature (1)..(600): RNAi target sequence
atttctttcaaactgggattcggtgaagacgtgacagctcagggggcgtttaatgaaaaaactgtgatttattagtgaaatagtggttaaaacccagcaaaatggggattaaatttttggaagttataaagcctttctgcagcatactgcctgaaatagccaagccagaaagaaaaatccaattcagggagaaagtactatggactgcaatcactcttttcatctttttagtatgttgtcagattccattattcggtataatgagttcagattctgcagatcctttctactggattcgtgttattcttgcatcaaacagaggtacccttatggaacttggtatttccccaattgtaacttcaggtctgattatgcagctgttggccggtgccaaaattatcgaggttggtgacactccaaagacagagccttattcaatggtgcccaaaaattgtttggtatggttattactgtcggtcaagccatcgtgtatgtaatgacaggcatgtatggtgatccggctgaaattggagctggagtgtgccttctcatcatcatccaactgttcgtcgccggtctcattgtattgcttctcgatga

SEQ ID NO: 398 - DNA, 22 bp, Artificial Sequence
  primer
  misc_feature (1)..(22): forward primer
atttctttcaaactgggattcg

SEQ ID NO: 399 - DNA, 22 bp, Artificial Sequence
  primer
  misc_feature (1)..(22): reverse primer
tcatcgagaagcaatacaatga

SEQ ID NO: 400 - DNA, 2110 bp, Diabrotica virgifera
  misc_feature (1)..(2110): WCRW transcript ta03313.003_diavv
ccaacatcatcgatcacgtgacccgtgtgctgtgctacgtgtacgacgtgtagacgtaaaacagagacaagaagtaccgtaatttctttcaaactgggattcggtgaagacgtgacagctcaggggggcgtttaatgaaaaaactgtgatttattagtgaaatagtggttaaaacccagcaaaatggggattaaatttttggaagttataaagcctttctgcagcatactgcctgaaatagccaagccagaaagaaaaatccaattcagggagaaagtactatggactgcaatcactcttttcatctttttagtatgttgtcagattccattattcggtataatgagttcagattctgcagatcctttctactggattcgtgttattcttgcatcaaacagaggtacccttatggaacttggtatttccccaattgtaacttcaggtctgattatgcagctgttggccggtgccaaaattatcgaggttggtgacactccaaagacagagccttattcaatggtgcccaaaaattgtttggtatggttattactgtcggtcaagccatcgtgtatgtaatgacaggcatgtatggtgatccggctgaaattggagctggagtgtgccttctcatcatcatccaactgttcgtcgccggtctcattgtattgcttctcgatgaacttctccagaaaggatatggtttaggttctggtatttccctcttcattgcaacaaacatttgtgaaactattatttggaaagccttctcaccagcaacagtaaacactggaagaggaacagaatttgaaggagctgtcattgccttattccacttgttgaccaccagacaagacaaaatcagaggattacgtgaagctttctacaggcaaaatcttcccaatttgatgaacttgttggcgacagtactcgtttttgctatagtaatatacttccaaggattcagagtagatctacccatcaagagtgcaagataccgtggacaatattccagctatccaatcaaattgttctacacttcgaacatccctattattctacaatctgctcttgtatctaacttgtatgtcatctcacagatgttggctgttaaattccaagggaacttcttaattaatctattaggagtctgggctgacgttggaggcggtggcccagctaggtcttaccccattggaggattatgttactacttatctccacctgaaagtgtaagtcacattctagaagatccaatccacgcaatgctctacatcgtcttcatgttgggatcttgtgctttcttctccaaaacatggatcgaagtatctggaagctcagccaaagatgtcgctaagcaattgaaagaacaacagatggtaatgagaggacacagagataactccatgattcacgaattgaacaggtacattcccaccgccgcagcttttggaggtctctgtattggagccttgtcagtactcgctgatttcatgggagccattggttcaggtactggtatcttgttagctgtcaccatcatctaccaatacttcgaaatcttcgtcaaagaacaaagcgagatgggtggaatgggagcgttactcttctagataaattgaagatatcacaaagctatagcttgactgatattgtgattttgtttggtaaatagtaactattgtggttattatttgtttagtttttgtacctcagtgtctccactatagttattatttatgtggaacaacttatatgtcactttgtataaagtgtgaaacatttttttgtactaaaagattgaaaatagacaaatatatttcattgtacatttacatgattttgtgtttaagaagcgagttatttataatgtgcggatgtcccatactattagtttattttttacattttttcattctcgttcatgcagtacggttgtgtattgatcatttattatttgttgttagatataatttattttaaatacagaaatttctgaaatcctgtttttcatttgatgctaatgtatactgtaaatgtttcgagataagggcatctatcatttaaatgttgaaatattattgaaatgtacaaatttacatgttctttt

SEQ ID NO: 401 - DNA, 707 bp, Diabrotica virgifera
  misc_feature (1)..(707): RNAi target sequence
gggggaccttttatatttgacatcctgaaagatggttgagaaaaaggctgtacagaagcccgctggggatgcaccaaaaaaggtgcacaaaccaggaaaacctagaaattatgatttgggaaatggagtactcagattttctagatctaaaatgttccacaaaaaagcattgtacaaatttgttggcaagaaggtagaagctaccaagaaacctcaaaagccccaggttattgaaaaaccaattggtggagagaaaaatggaggaaagagatttgttttggtcaagaaacgtagggcatcctatccaacccaagacaaaattaaggccaggccagctaggagaacatttagccaacacacaaggtctattagaaatacaatcactccaggaacagttctcatccttttagctggttctcacaaaggaaagagggttgtattccttaaacaactgtactctggtctacttttggtaactggaccttttggaatcaatgcttgcccattgaggcgcattagccaacgatatgtaattgctacatctaccaaaattgacgttagtggagtacagctgccagaaaaccttaatgatgaatattttgcaagaaagaggcagaagagatccaagaaagaagaaggtgatattttccaatccaaaaaagaaggttacaaagtaagtgaagataggaaagctgaccaaaagaaag

SEQ ID NO: 402 - DNA, 18 bp, Artificial Sequence
  primer
  misc_feature (1)..(18): forward primer
gaccttttatatttgaca

SEQ ID NO: 403 - DNA, 22 bp, Artificial Sequence
  primer
  misc_feature (1)..(22): reverse primer
ctttcttttggtcagctttcct

SEQ ID NO: 404 - DNA, 1036 bp, Diabrotica virgifera
  misc_feature (1)..(1036): WCRW transcript ta17558.001_diavv
aaggagagggaggttttcctgtttgtgcaccttttttgtgcagacagaacgaccacctggacacgcatgctatgggggaccttttatatttgacatcctgaaagatggttgagaaaaaggctgtacagaagcccgctggggatgcaccaaaaaaggtgcacaaaccaggaaaacctagaaactatgatttgggaaatggagtactcagattctctaggtctaaaatgttccacaaaaaagcattatacaaattcgttggcaagaaagtagaagctaccaagaaacctcaaaagccccaggttattgaaaaaccaattggtggagagaaaaatggaggaaagagatttgttttggtcaagaaacgtagagcatcctatcctacccaagacaaaattaaggccaggccagctaggagaacatttagccaacacacgaggtctattagaaatacaatcactccaggaacagttctcatccttttagctggttctcacaaaggaaagagggttgtattccttaaacaactgtactctggtctacttttggtaactggaccttttggaattaatgcctgtccattgagacgtattagccaacgttatgtaattgctacatctaccaaaattgacgttagtggagtacagctgccagaaaacctaaatgatgaatattttgcaagaaagaggcagaagagatcaaagaaagaagaaggtgatattttccaatccaaaaaagaaggttacaaagtaagcgaagataggaaagctgaccaaaagaaagtagatacacaagttctggctgcaatcaagaagcaatcagaccgcaaagtacttttagcttatttgtcagccatgtggggactcagatcatcacagtacccacacagattgaagttttagataagagataccataaattgtttatcttttgacttgtatagagaggaaagtgataaataaattatggatttataaatgaggtttttttatgtgactgttgttataatacaataatttaattcttaaaaaaaaaaaaa

SEQ ID NO: 405 - DNA, 671 bp, Diabrotica virgifera
  misc_feature (1)..(671): RNAi target sequence
gggaaccttattttatggtgtcgtgccagcagaaaattttaaaaattcttgtaattgtttagacatttcgcaacaattgtgaacaattttggaaaatattgcttgaaagctataattctagatgtaagagcaaagttttgtagtcaaaatggctggagtattcgatttagaactgcatgatgttgaaactgtagaagtagatgattcagacgatgcaatcgaaattgaagaggatgaatatgatcaaaatcctaatattaatgcaattgtagaatccgatgatacagaaacggttcatctgactgaacaaattgtgaacccgggccaggaaaaaaccggaccccatgactttgaattacgcaaagtcctgggcaaaggaggttatggcaaagtatttcaagttagaaaaattacggggaaagatgccaatactgtctttgccatgaaggttctccgcaaggcttccatagttagaaatcaaaaagatactgcccatacgaaagcagaacgaaatattttagaagaagttaagcatccttttatagtggatttgatatatgccttccaaacgggtggaaaattgtacttaattttagaatacctcagcgggggcgaactttttatgcatttagaaagagaaggaatatttttagaggataccgcttgctttt

SEQ ID NO: 406 - DNA, 21 bp, Artificial Sequence
  primer
  misc_feature (1)..(21): forward primer
gaaccttattttatggtgtcg

SEQ ID NO: 407 - DNA, 22 bp, Artificial Sequence
  primer
  misc_feature (1)..(22): reverse primer
aaaagcaagcggtatcctctaa

SEQ ID NO: 408 - DNA, 2032 bp, Diabrotica virgifera
  misc_feature (1)..(2032): WCRW transcript ta00443.001_diavv
gggggagacataaccttattttatggtgtcgtgccagcagaaaattttaaaaattcttgtaattgtttagacatttcgcaacaattgtgaacaattttggaaaatattgcttgaaagctataattctagatgtaagagcaaagttttgtagtcaaaatggctggagtattcgatttagaactgcatgatgttgaaactgtagaagtagatgattcagacgatgcaatcgaaattgaagaggatgaatatgatcaaaatcctaatattaatgcaattgtagaatccgatgatacagaaacggttcatctgactgaacaaattgtgaacccgggccaggaaaaaaccggaccccatgactttgaattacgcaaagtcctgggcaaaggaggttatggcaaagtatttcaagttagaaaaattacggggaaagatgccaatactgtctttgccatgaaggttctccgcaaggcttccatagttagaaatcaaaaagatactgcccatacgaaagcagaacgaaatattttagaagaagttaagcatccttttatagtggatttgatatatgccttccaaacgggtggaaaattgtacttaattttagaatacctcagcgggggcgaactttttatgcatttagaaagagaaggaatatttttagaggataccgcttgcttttatttatccgaaatcattctcgccctagaacatttacatggacaaggaattatttatagagatctaaagcctgaaaatattttacttgacgcccacggtcacgttaaattgacagatttcggtctgtgtaaagaacacattaacgaaggcatattgacccacacgttttgtggaactattgaatatatggcacctgaaattttaactagacatggccatggaaaagaggttgattggtggtcattaggggcattgatgtacgatatgttaactggtgcacctccgtttaccgctgaaaatagaaaaaagacaatagaaaaaattactaaagggaaaactaaaccttccgccttatttgaccgccgatgctcgtgatttagtacgcaaattactaaagaggcaggttccttcgagattaggggctcctcccgatgatgcaaatgctgtcaaacgacatcaattcttcaaacacatcgtctgggatgatgtcctgagaagaaaatatgaacctccatttaaaccaagtcttgctagtgatgatgatgtctctcagtttgataccagatttacaaaacaaactccagtagattcgccggacgaatcgactcttagtgaaagtgccaacatgatattccagggctttacctacatagcaccctccgtcttggaagatatctataaaccaacgatagtaaaagctcgctctccccgtaaaggttcctatcgccctcatttcggttttacgcctactcatcatagtcatcccaataacctggatccgaattgcagctacgtagcaggaatgtcttctgcgcacgctgcgcactccaatcacgtgcctccacatgctgcacacggacttgcgcatcatccacatgcgcaccatcataacccgtttgctccacaagcagtctttaatataccaacaaatgcatgcgcagacgagatgatggaagtcggcagcggactacctcatgtatagtatatatatgatagattaggaccggtctttttatataagagttgataggaagtttttgataggtatcgattcattagttcaattttgttttttatgattaatattattttgactggaggtgtcaaatttcctaatgatagatttagcttcccttgatcgatcacattataaaatacaataatttttgaactgaagtatcgcatgtgtcaaaagttgatatctttggaaaataaagactatattatgtgttgttatacatttaatttgttgaagtctagttacaaaaggctcaattttgttaaaataggtttggcaagtgcacctaggtcagtatgggttgcgaatttaaaatggttataaaaaatatgctca

SEQ ID NO: 409 - DNA, 612 bp, Diabrotica virgifera
  misc_feature (1)..(612): RNAi target sequence
gagcttgcgatttttatttttgaaaaatagagagtattctctaatatttaaggacagtatggaagacgattgggctgtggataatcagagtggtggagttgtcgccccaaaaattgcagaactacctgaaattaagttgttcgctagatggaactgcgatgatgtccaagtttcagacatgtcccttcaggactacattgcagtgaaagaaaaaaatgcaaagtatttaccccattcagctggtagatatgctgcaaaaaggttccgtaaagcacaatgcccaatcgttgagaggttaacaaactctctaatgatgcatggacgtaacaatggtaaaaaattgatggctgtcagaattgttaaacatgcttttgaaattatccatttactaactggagaaaatccattacagattttagtttctgctattatcaattcaggacctagagaagattctactcgtattggtagagctggtactgtaagaagacaagctgttgatgtgtcacccttgagaagggttaaccaagcaatttggttgctctgcacaggtgctagggaagcagcattccgtaatattaaaactattgctgaatgtttggctgatgaatt

SEQ ID NO: 410 - DNA, 23 bp, Artificial Sequence
  primer
  misc_feature (1)..(23): forward primer
gagcttgcgatttttatttttga

SEQ ID NO: 411 - DNA, 22 bp, Artificial Sequence
  primer
  misc_feature (1)..(22): reverse primer
aattcatcagccaaacattcag

SEQ ID NO: 412 - DNA, 780 bp, Diabrotica virgifera
  misc_feature (1)..(780): WCRW transcript 454run3_isotig03469
aagttttatccatatttattattggaaataaaatataaaatgagaaataaatttaacggttggatttggctacacgttcaagttcatccttctttttgatagcatatgaatttgatgatcccttggcagcattgattaattcatcagccaaacattcagcaatagttttaatattacggaatgctgcttccctagcacctgtgcagagcaaccaaattgcttggttaacccttctcaagggtgacacatcaacagcttgtcttcttacagtaccagctctaccaatacgagtagaatcttctctaggtcctgaattgataatagcagaaactaaaatctgtaatggattttctccagttagtaaatggataatttcaaaagcatgtttaacaattctgacagccatcaattttttaccattgttacgtccatgcatcattagagagtttgttaacctctcaacgattgggcattgtgctttacggaacctttttgcagcatatctaccagctgaatggggtaaatactttgcatttttttctttcactgcaatgtagtcctgaagggacatgtctgaaacttggacatcatcgcagttccatctagcgaacaacttaatttcaggtagttctgcaatttttggggcgacaactccaccactctgattatccacagcccaatcgtcttccatactgtccttaaatattagagaatactctctatttttcaaaaataaaaatcgcaagctcttgctgaacgacggcgtgaaccggaaaaggt

SEQ ID NO: 413 - DNA, 630 bp, Diabrotica virgifera
  misc_feature (1)..(630): RNAi target sequence
gcttctttttcgttggatgtctttgtaggttttaaaaatgggagcctacaagtatatacaggagttgtatagaaaaaaacaaagtgatgttcttagatttttactgagagtgagagtctggcaatatcgccaattgactaaactccacagaactcccagacccagtcggcctgacaaggctcgcagaatgggttacagggccaagcaaggttttgttatttaccgtattagagtacgacgtggaggacgcaagcgtccagtaccaaaaggtgccacctacggtaaacccaaaagccatggagttaatgaattgaaacctgtccgtaacttacaagctattgctgaggaacgtgtaggaagaaggtgtggtggattaagagtcctaaactcctactgggtagcccaagattcaacatacaaatattttgaaatcattttggtcgacccctcacataacgctattcgcaaggaccccaaaattaactggattgtcaactcagtacacaaacacagagaactccgtggcaaaacttcctctggcaaatcatctcgtggtttgggcaagggtcacagatactctcaaaccaagggaggatccaggcgtgccgcttggctcagaaggaactcact

SEQ ID NO: 414 - DNA, 22 bp, Artificial Sequence
  primer
  misc_feature (1)..(22): forward primer
gcttctttttcgttggatgtct

SEQ ID NO: 415 - DNA, 22 bp, Artificial Sequence
  primer
  misc_feature (1)..(22): reverse primer
agtgagttccttctgagccaag

SEQ ID NO: 416 - DNA, 1374 bp, Diabrotica virgifera
  misc_feature (1)..(1374): WCRW transcript ta18374.001_diavv
tatataactcggattaccacagtcaaagtgcataaaacttaacaatacgcaaaaaccgtagcagtccgtttatttctttcctgcggccttggctggagccttcttggccttcttaggctttgatttcttatctttcaagatttgtgcccttctcctttcttgcaattttctggatctaatcacgacgttgtcggcactcacggtaataccacgtttcttggccaaaagttcttccctgtttaactgtctcttttgattcttcaaaatggcttcacgtttgagtacagcagcatatggattcaacttaagcatggccttagcgttggtcaatggattgagacgacgtacacgacgtacaaccttcttttgaggagcacgtaatacagctttgatttcatcagccttcaacaatctagatagatcagtgttggccattttaggctggggtagattgtaacccttcttttccaatgatgctgttttccatgtgccgaacaatttatctaaacgttggaaagctgattcagtccaaataacaaagcgacctacatgaccaccaggagcaagtttcaacaaatttaacttctgtacgctaatgaggtcaatgcctgggatgttacggaaagcacgacgaagacctacaagggggacttgcgcgttgaactttctttttcgttggatgtctttgtaggttttaaaaatgggagcctacaagtatatacaggagttgtatagaaaaaaacaaagtgatgttcttagatttttactgagagtgagagtgtggcaatatcgccaattgactaaactccacagaactcccagacccagtcggcctgacaaggctcgcagaatgggttacagggccaagcaaggttttgttatttaccgtattagagtacgacgtggaggacgcaagcgtccagtaccaaaaggtgccacctacggtaaacccaaaagccatggagttaatgaattgaaacctgtccgtaacttacaagctattgctgaggaacgtgtaggaagaaggtgtggtggattaagagtcctaaactcctactgggtagcccaagattcaacatacaaatattttgaaatcattttggtcgacccctcacataacgctattcgcaaggaccccaaaattaactggattgtcaactcagtacacaaacacagagaactccgtggcaaaacttcctctggcaaatcatctcgtggtttgggcaagggtcacagatactctcaaaccaagggaggatccaggcgtgccgcttggctcagaaggaactcactgcaattgcgcagaaaacgttaaaatttatttttttataattagaccaataaaatttacggattaaaaaaaaaaaaaaaaaa

SEQ ID NO: 417 - DNA, 663 bp, Diabrotica virgifera
  misc_feature (1)..(663): RNAi target sequence
  misc_feature (570)..(570): n can be any nucleotide
gggcgaaactgttcttcattatcctttctaggtcgtgtaaaatacgtgaaggccaaaatgggtagacgacctgcgaggtgctaccgttattgtaaaaacaaaccctaccccaaaagtcgtttctgcagaggtgttccagatccaaaaatccgtattttcgatttgggtaagaagaaggcttccgtagaagactttcctctatgtgtacatttagtttctgacgaatatgaacagctaagttctgaagcattagaagcaggacgtatctgttgtaacaaatatttggtaaagaactgtggtaaagatcaattccacattcgtatgagactccatcctttccatgttatcagaatcaacaagatgttgtcatgtgctggagctgatagactccagactggaatgagaggagctttcggcaagccccaaggtacagttgctcgtgtccgcattggtcaacctattatgagtgtacgctctagtgatcgtttcaaggctgcagttattgaggctctccgtcgtgccaagttcaagttcccaggtcgtcaaaagatctatgtatcgaagaaatgnggattcaccaagtatgaacgtgaacaatatgaaaacttaaaacaacaaggtagattagctcctgatggttgcaatgttcaatacaggccagag

SEQ ID NO: 418 - DNA, 20 bp, Artificial Sequence
  primer
  misc_feature (1)..(20): forward primer
gcgaaactgttcttcattat

SEQ ID NO: 419 - DNA, 22 bp, Artificial Sequence
  primer
  misc_feature (1)..(22): reverse primer
ctctggcctgtattgaacattg

SEQ ID NO: 420 - DNA, 726 bp, Diabrotica virgifera
  misc_feature (1)..(726): WCRW transcript ta04337.003_diavv
gaaggtttgtttcttaatttattttaacaatcttacgtttttagttgtagtgatatatttttataaactaaatactgaatacgtaataacgtatatgtgttagttttttaatctacatatttattttctattttcaggccaaaatgggtagacgacctgcgaggtgctaccgttattgtaaaaacaaaccctaccccaaaagtcgtttctgcagaggtgtcccagatccaaaaatccgtattttcgatttgggtaagaagaaggcttcagtagaagactttcctctatgtgtacatttagtttctgacgaatatgaacagctaagttctgaagcattagaagcaggacgtatctgttgtaacaaatatttggtaaagaactgtggtaaagatcaattccacattcgtatgagactccatcctttccatgttatcagaatcaacaagatgttgtcatgtgctggagctgatcgactccagactggaatgagaggagctttcggcaagccccaaggtacagttgctcgtgtccgcattggtcaacctattatgagtgtacgctctagtgatcgtttcaaggctgcagttatcgaggctctccgtcgtgccaagttcaagttcccaggtcgtcaaaagatctatgtatcaaaggaaatggggattcaccaagtatgaacgtgaacaatatgaaaacttaaaacaacaaggtagattagctcctgatggt

SEQ ID NO: 421 - DNA, 625 bp, Diabrotica virgifera
  misc_feature (1)..(625): RNAi target sequence
gcgaaagttgtgtcttgaaaagtaaaaatgacgtctaaagtatctcgtgatactctatacgagtgtgtgaatggagtcttggaaaatgccaaggagaagaaaaggaactttttggaaaccgtggaactccagatcggtcttaagaactacgatccccaaaaggacaagcgtttcagcggaaccgtcaaactaaagcacattcctcgtccaaagatgcaggtatgcatcttgggagatcagcaacattgtgatgaagctaacgctaacaatgttccattcatggatgtagaagccttgaaaaaattgaacaaaaacaagaaattggttaagaaactagccaagaaatatgatgctttcctcgcttctgaagctctcatcaaacagatccccaggttgttgggtccaggtttgaacaaggctggtaaattccctggtcttctctcccaccaggaatccatgacacagaaaattgatgaagtaaaagcaacaatcaaattccaaatgaagaaggtactctgcctctctgttgctgttggtcatgtaggcatgaatcaagatgaattggttcaaaatgtccatctttcaatcaacttcttggtctcactgttgaagaaacattggcaga

SEQ ID NO: 422 - DNA, 22 bp, Artificial Sequence
  primer
  misc_feature (1)..(22): forward primer
gcgaaagttgtgtcttgaaaag

SEQ ID NO: 423 - DNA, 22 bp, Artificial Sequence
  primer
  misc_feature (1)..(22): reverse primer
tctgccaatgtttcttcaacag

SEQ ID NO: 424 - DNA, 1055 bp, Diabrotica virgifera
  misc_feature (1)..(1055): WCRW transcript ta02345.005_diavv
aagactagtaccttcacataatatggagaatctcctgggttgaacatagaaaaaaatgtataatgtatccataatagaacaactcaatataaaagataggttgcttaaacaaacacaacagagatacagtattttggacacatttcctgaagaacaggaacactttatcattcctggtgcatttcgttaacgtagacaagccgcaaaagttgtgtcttgaaaaataaaaatgacgtctaaagtatctcgtgatactctatacgagtgtgtgaatggagtcttggaaaatgccaaggagaagaaaaggaactttttggaaaccgtggaactccagatcggtcttaagaactacgatccccaaaaggataagcgtttcagcggaaccgtcaaactaaagcacattcctcgtccaaagatgcaggtatgcatcttgggagatcagcaacattgtgacgaagctaacgccaacaatgttccattcatggatgtagaagccttgaaaaaattgaacaaaaacaagaaattggttaagaaactagccaagaaatatgatgctttccttgcttctgaagccctcatcaaacagatccccaggttgttgggtccaggtttgaacaaggctggtaaattccctggtcttctctcccaccaggaatccatgacacagaaaattgatgaagtaaaagcaacaatcaaattccaaatgaagaaggtactctgcctttctgttgctgttggtcatgtaggcatgaatcaagatgaattggttcaaaatgtccatctttcaatcaacttcttggtctcactgttgaagaaacattggcagaacgttaggtctctccacgtcaaatcatctatgggacccccacaaagattgtattaagttataatttttatactgagacttttatttacacacttaaatgtgggtatctaaataaacatcgtttttaagttctttaaaaaaaaaaaaaatagaaaaaaaaaatgattggatgtacatattatactaccctactaagtaaaaaaatacatctaaaaaaaaaaaaaaaaaa

SEQ ID NO: 425 - DNA, 693 bp, Diabrotica virgifera
  misc_feature (1)..(693): RNAi target sequence
gggggacattttcgtttgtaaataacaaataacagtaaagtaaagaataaaaattgaagaattttatatgattcctttaattttcgtcttcaaatagcatataagttatattctgagtttataaaattaacaccatgcctacgataatattgctggacgtgtctctttctatgacgaggcctgttcaagttggtgagggctttgaaacagtctcaagaaagcaactggcggaattagggattaatgcatttttggattatcttagcatacattccaaattagagtttatatctttgatggctttttcgtcattgtacgaggagaggtgtccttttaccagagattacaatgctattaaagcagaattaaagaatatagaagactatgataaaacttgcattgaaacagcgcttcatggtgttaatcacatggttcttggagagtgggggaataacacggcttgtcaggtattattagtaacggatggaaatactggaattggaacgaattccttgaaagaagcaattgctacaatgaatcaaaggaataataaaataccatttcctgttcctttttcattcccaggaaaattacatgtggtgtgtctcacttctccctgtgatttaagttttattaaatctaaaccactttttcagaggttgattgatttaagtggttacgacggatcaattt

SEQ ID NO: 426 - DNA, 21 bp, Artificial Sequence
  primer
  misc_feature (1)..(21): forward primer
gggggacattttcgtttgtaa

SEQ ID NO: 427 - DNA, 22 bp, Artificial Sequence
  primer
  misc_feature (1)..(22): reverse primer
aaattgatccgtcgtaaccact

SEQ ID NO: 428 - DNA, 1551 bp, Diabrotica virgifera
  misc_feature (1)..(1551): WCRW transcript ta10911.001_diavv
ggacattttcgtttgtaaataacaaataacagtaaagtaaagaataaaaattgaagaattttatatgattcctttaattttcgtcttcaaatagcatataagttatattctgagtttataaaattaacaccatgcctacgataatattgctggacgtgtctctttctatgacgaggcctgttcaagttggtgagggctttgaaacagtctcaagaaagcaactggcggaattagggattaatgcatttttggattatcttagcatacattccaaattagagtttatatctttgatggctttttcgtcattgtacgaggagaggtgtccttttaccagagattacaatgctattaaagcagaattaaagaatatagaagactatgataaaacttgcattgaaacagcgcttcatggtgttaatcacatggttcttggagagtgggggaataacacggcttgtcaggtattattagtaacggatggaaatactggaattggaacgaattccttgaaagaagcaattgctacaatgaatcaaaggaataataaaataccatttcctgttcctttttcattcccaggaaaattacatgtggtgtgtctcacttctccctgtgatttaagttttattaaatctaaaccactttttcagaggttgattgatttaagtggttacgacggatcaattttggtgccagacaatattcatagtgaatcgagcgtaattagtttatttcagaaacttgctgaagacatgtacacaacatttaagggcaccctaaagtgtggcaatttagaatcaaaaataatattgtcgccagctcctgtggcttatacaaagtttacggattttgaatgcaacacatataacatgtcagaactaatagaagtgtgcggtttcgtatcagttacggatgtagggtcaccgatggccattagccgtcatctaattcttccagccagttctccaaccaaacaagaaagtgttgccaaaaatgacacggaagccaccgaagatgacagcactgacgaagcgaaaataccatcattttgtgtactacttcatggagctttaagagtagagaatatggcagcattggtgaatataggagaaaactggttcggattcgtatattcctgggcagattcgaagaaaaagtcaaatttgatgctaactattttaatgccaggcactgatatcataccttggttaggagatttaaattgtttgggatccgcagaatcttattcgtctgagcaaataggcagttttcctattaaacctatggagaagaggagttactctcagaacggagtcgtttggattcgccaagcaggtctgcaatcggatattcagaaaatattacgacatgcaagaaagttgcccgagaaaactcagcaattctataaggaacttaacaggcttagaaaagcagcaatatccttaggtttcttggatcttttaaacggattggcttatatttttgaacaagaatgtttacagttacctccaagtgcacatccagattgtgctgtccagttacaacatg

SEQ ID NO: 429 - DNA, 651 bp, Diabrotica virgifera
  misc_feature (1)..(651): RNAi target sequence
gggggctcttagttatccatcttggcttcgtttaggttttagcttagcactagcaccacgttttcgttttaagttgactgttgactttggccattgtttcaagtgtagttgtcttatcgttatcgttacaatttgaaatttggattgagtttgagttgttaggaccaggaccaggtttataacacaagtggatatctattcatcatggcaattgattgggaaaaaattgtaactgaactaagtgctgtgttccaagatgagcaagagacatttgcgagagttttgttttatttaggagaagaagaaaaggtgtataaagatgccgataaactaggaccgcagatgaagatcttaatgtcatctatgaaagtagcatctttgtttagtcagtacgccaaacggttagcagaggacacaaagagggctgattcggatgaaaagttcaaacgagtgatgggtctaatctgggcccaaatgatggacgctaacaaacagacagatgacaaagataaaaccccagatgtaagcattattgccaaattagaacacctgtctctagaagcttcgccaggaatggttcgcgccttgagcattattccatatgaaagccaaaagcgttttttagtaatgctcaaagacatcgtaccaaca

SEQ ID NO: 430 - DNA, 22 bp, Artificial Sequence
  primer
  misc_feature (1)..(22): forward primer
gggggctcttagttatccatct

SEQ ID NO: 431 - DNA, 22 bp, Artificial Sequence
  primer
  misc_feature (1)..(22): reverse primer
tgttggtacgatgtctttgagc

SEQ ID NO: 432 - DNA, 1310 bp, Diabrotica virgifera
  misc_feature (1)..(1310): WCRW transcript ta05539.003_diavv
cagagacttcatgctcatgctccttctcttagttatccatcttggcttcgtttaggttttagcttagcactagcaccacgttttcgttttaagttgactgttgactttggccattgtttcaagtgtagttgtcttatcgttatcgttacaatttgaaatttggattgagtttgagttgttaggaccaggaccaggtttataacacaagtggatatctattcatcatggcaattgattgggaaaaaattgtaactgaactaagtgctgtgttccaagatgagcaagagacatttgcgagagttttgttttatttaggagaagaagaaaaggtgtataaagatgccgataaactaggaccgcagatgaagatcttaatgtcatctatgaaagtagcatctttgtttagtcagtacgccaaacggttagcagaggacacaaagagggctgattcggatgaaaagttcaaacgagtgatgggtctaatctgggcccaaatgatggacgctaacaaacagacagatgacaaagataaaaccccagatgtaagcattattgccaaattagaacacctgtctctagaagcttcgccaggaatggttcgcgccttgagcattattccatatgaaagccaaaagcgttttttagtaatgctcaaagacatcgtaccaacaacagtgctatcgaatgtagagtatgttgttgaaactgttaacaaagtaggtggtgctgtagtaactgtagctttagctagtatacaattggcatatgaagctattgttaacattagaagatggtggaatggagagatttcaggcaagagatgttgtaaaaatattatagattcacttgctacaattggtggtagcgttggtggaggatttgctggtgtagctttgggagcacttggaggtccagttggcatgataatcggaggtattggtggaggaatgttgggcggagaattggccaagcgtctgtcgcaatggatgactgaaaaggtatttgatgttccaaaatctgaggcgctagaaaatgcttataatttctttaatttgcgcaatcatgcttccaatcatcagataaatacagcttacagacagaagtgtctagaataccatcctgataaaggaggttctgaggaaatgttccataaagtgcagatggaaatggcggttattaaagctgccaaaggagaattgtattcataataattagtttgtatttttgtacttagatttagattatataacatattttgtactatactattttatgtacacattatatttgtacagaaataaaaattaacg

SEQ ID NO: 433 - DNA, 658 bp, Diabrotica virgifera
  misc_feature (1)..(658): RNAi target sequence
  misc_feature (546)..(546): n can be any nucleotide
atgtttttaagatgggccagtgccagtcacacattgtgtttaagtttattttcgtgtttcttgctgggtacgaccgagtaacgaacaacctaggatatcacgccaaattcacaagtaacaagttccagtcctggagtaggagcagccctggcggcgttaggaagtctcggtggaatcttcggcaatcacttacaaatgttaggaagcttaccagctttccagagtccgcagagcctgcaacagctgcagcagctggcgatgctgcagcaggctagcggcaaccagatgaatccgcaggctcagtttttatttcaaaatcagggttttctacaagggttccctagaacaagtataccttctagacccccacatacaatgcaggtacaacaaatagcacaagctgcccagcaactacagcaactgcagaaagtacagcaaaacacaaaccaacacaataccagcattcctcaaaatacgacgttacctcatcaaacgcagaccacgcctccaaacaaccacaatatacctgccagcatgcttactccnagcacgcctagttctggtggacttacgccgcagcatcttaaaacaccctcaaggatactggaaccatctccagaagaaaccacagatttggaagaacttgaacagtttgcga

SEQ ID NO: 434 - DNA, 22 bp, Artificial Sequence
  primer
  misc_feature (1)..(22): forward primer
atgtttttaagatgggccagtg

SEQ ID NO: 435 - DNA, 22 bp, Artificial Sequence
  primer
  misc_feature (1)..(22): reverse primer
tcgcaaactgttcaagttcttc

SEQ ID NO: 436 - DNA, 698 bp, Diabrotica virgifera
  misc_feature (1)..(698): WCRW transcript ta21806.001_diavv
  misc_feature (566)..(566): n can be any nucleotide
ggagtgcatattgcccgcagatgtttttaagatgggccagtgccagtcacacattgtgtttaagtttattttcgtgtttcttgctgggtacgaccgagtaacgaacaacctaggatatcacgccaaattcacaagtaacaagttccagtcctggagtaggagcagccctggcggcgttaggaagtctcggtggaatcttcggcaatcacttacaaatgttaggaagcttaccagctttccagagtccgcagagcctgcaacagctgcagcagctggcgatgctgcagcaggctagcggcaaccagatgaatccgcaggctcagtttttatttcaaaatcagggttttctacaagggttccctagaacaagtataccttctagacccccacatacaatgcaggtacaacaaatagcacaagctgcccagcaactacagcaactgcagaaagtacagcaaaacacaaaccaacacaataccagcattcctcaaaatacgacgttacctcatcaaacgcagaccacgcctccaaacaaccacaatatacctgccagcatgcttactccnagcacgcctagttctggtggacttacgccgcagcatcttaaaacaccctcaaggatactggaaccatctccagaagaaaccacagatttggaagaacttgaacagtttgcgaagacgttcaaacagagaagg

SEQ ID NO: 437 - DNA, 647 bp, Diabrotica virgifera
  misc_feature (1)..(647): RNAi target sequence
  misc_feature (524)..(524): n can be any nucleotide
aatttcagccgtcatctgttgtgttggtgtgtctgtatttttgtgaatttcgcaaatatttttgattctaataacaaaaccttttgctaaattcagtgaatcatagtgctactttcttgttaaattcataagggaaagaagcatcaaccaacaaaaaattgtgaatgttctcctagagagatttcaactaacttcagagcaactctatatcattcaaggaaataaggagtttttattgactcctgaaatatttaatgtactagataagatccaagaaatacgcaatgattgtaaaatacttatgcagtctggtcttcaaacgttggctttagatattatggagcaaatgaccacatatcaggaggcagggttggaaaaattatatagatggacccaaagtcactgtagaaatgttgaaaaccctgaattaacagatctagttacacaatcaatggcaaggcttcaacacagacaagttttgtttaagtatgtaatcgatgaatactgcatatgtcgcagaagcnagataactgatgattttatcaacgctctaacacgaggagggccatctggaaatcctgctcctatagaaatgagagctcacgattctcagatctatgtcacagatatgctcgtttggttgaaca

SEQ ID NO: 438 - DNA, 22 bp, Artificial Sequence
  primer
  misc_feature (1)..(22): forward primer
aatttcagccgtcatctgttgt

SEQ ID NO: 439 - DNA, 22 bp, Artificial Sequence
  primer
  misc_feature (1)..(22): reverse primer
tgttcaaccaaacgagcatatc

SEQ ID NO: 440 - DNA, 727 bp, Diabrotica virgifera
  misc_feature (1)..(727): WCRW transcript ta21805.001_diavv
  misc_feature (540)..(540): n can be any nucleotide
ggcaatcgataccaaaaatttcagccgtcatctgttgtgttggtgtgtctgtatttttgtgaatttcgcaaatatttttgattctaataacaaaaccttttgctaaattcagtgaatcatagtgctactttcttgttaaattcataagggaaagaagcatcaaccaacaaaaaattgtgaatgttctcctagagagatttcaactaacttcagagcaactctatatcattcaaggaaataaggagtttttattgactcctgaaatatttaatgtactagataagatccaagaaatacgcaatgattgtaaaatacttatgcagtctggtcttcaaacgttggctttagatattatggagcaaatgaccacatatcaggaggcagggttggaaaaattatatagatggacccaaagtcactgtagaaatgttgaaaaccctgaattaacagatctagttacacaatcaatggcaaggcttcaacacagacaagttttgtttaagtatgtaatcgatgaatactgcatatgtcgcagaagcnagataactgatgattttatcaacgctctaacacgaggagggccatctggaaatcctgctcctatagaaatgagagctcacgattctcagatctatgtcacagatatgctcgtttggttgaacaaagcgattgctttggaaaagcagaatgttagtttattgttgaaattgtgcaataaagtagagct

SEQ ID NO: 441 - DNA, 711 bp, Diabrotica virgifera
  misc_feature (1)..(711): RNAi target sequence
gggggataagataataaatcgaacatacctgtttcgactctatgtggaatttgtcagtgcatggttatgcaatttagttaaaggttaaggataataattagtggaaaaaatgagttgcggttttgattcacaaagaatttatatgctaggtgaaaaatattcaggtctaaaagctagaggtgctctccaaaattatgaagaaattagaaagaaatatctgctgaacaatgcattattcgaagactcacaatttcaagtagaaaaagtagaactcggacaagagtgggacaatcataagaacaacattaagtggctccgaccccaggaaatggtttccgatccagtttttctagaagctcatgaagacaggttcgatattaaacaaggaactttgggcgattgctggtttttagcagctttggcaaacataacagacaataataaaataatgcagcgtattataccagacaatcaaagcttttctcaagattatgcaggagtatttcatttcaggttttggcaatatggtagatggatagacgtggttattgacgacaaattacctactatagatggtaaacttatctttactaagaccaaatttagcaacgtattttggacacctttattggaaaaagcatatgcaaaactgtatggatcttataaaaatattgaggggggctttatttctgaagctctggaagatttcac

SEQ ID NO: 442 - DNA, 24 bp, Artificial Sequence
  primer
  misc_feature (1)..(24): forward primer
gggggataagataataaatcgaac

SEQ ID NO: 443 - DNA, 23 bp, Artificial Sequence
  primer
  misc_feature (1)..(23): reverse primer
gtgaaatcttccagagcttcaga

SEQ ID NO: 444 - DNA, 2478 bp, Diabrotica virgifera
  misc_feature (1)..(2478): WCRW transcript ta05594.001_diavv
gggggataagataataaatcgaacatacctgtttcgactctatgtggaatttgtcagtgcatggttatgcaatttagttaaaggttaaggataataattagtggaaaaaatgagttgcggttttgattcacaaaaaatttatatgctaggtgaaaaatattcaggtctaaaagctagaggtgctctccaaaattatgaagaaattagaaagaaatatctgctgaacaatgcattattcgaagactcacaatttcaagtagaaaaagtagaactcggacaagagtgggacaatcataagaacaacattaagtggctccgaccccaggaaatggtttccgatccagtttttctagaagctcatgaagacaggttcgatattaaacaaggaactttgggcgattgctggtttttagcagctttggcaaacataacagacaataataaaataatgcagcgtattataccagacaatcaaagcttttctcaagattatgcaggagtatttcatttcaggttttggcaatatggtagatggatagacgtggttattgacgacaaattacctactatagatggtaaacttatctttactaagaccaaatttagcaacgtattttggacacctttattggaaaaagcatatgcaaaactgtatggatcttataaaaatattgaggggggctttatttctgaagctctggaagatttcaccggtggactaaatgaaagataccttgatttagcaaacatttcaaaacatgaggaccttttcaaaatgatgctaatttcatttatgagaaaatcgtacatgggctgtggtatcctggattctggtgaagttgaaggagaaagaaaagatggactttattcaagtcatgcttacagtataaacaatgtagtggaggttacctcaaaagctgaaaaagtctataagttgcttaggcttaggaatccatggggcacgggtgagtggacaggcgactggagtgaccattcaaaaacctgggaccttcttccagacgaaactaaaaataagttattagtgataaaggatgatggagaattttggatgcaacacgaggatttcattaaagattataatttgttagaattttgtcaccctaatcccgactcactagaatatgaagaagatgaatcacataaatggaacatttttatgcttgatggcagttgggttgcaaaaattagtaatggaggtcagccacatagtacaagtttttggcataactcgcaatatttgttaaaaataaatgatagtagtaatgctatacacagagtagtaattggattaatgcagaagaatagaagactgtacaatcttcccaagattcctataggatttgctgtgtatgaactaaaatccgtttctggacgtttaacgcataattttttctcctcaattaaacctatatatattagagaaccagagaacaatacacaggttacgggacacatagatttaccaaaaggatcctactgcataataccatttacagatgaaccacaagcaagctgtgaatttcttttaagggtttactctactgttacatttgatgttaatgaacacgaagtagatgttcgattgatagatccaacagtaccattaggagggttacgtgcacctgtagacgcagtagatggtgcggctgccgataaaggaataaaacatgtattcgagaactatgctgataaagaattagaaataggttggaaggaactagtatctatactagaacttcttttctcaacagaacaacacatattttcaaaggaactgtgtcgaagtatggttgcattagcggatactgacctttcaggaaaactcaattttcaggaattctatgagctttgggaacaaattggagaattaaaaggcattttcaaaaattttgattcagatagttccaacggaatgtcagtgcgtgaacttagacaggctcttagagtagctaatttccaacttagcaataaaattttatccctaattggactgagatacgcaaacgaaaaagatgagttggaattagaagactttttgcattgttgcgttaaattaaaattaatgatagatatttacaactccaaaaagaaaagagaatatggcttggaggaatggttacttgaaacaatgtatgcttaaggtgcaagaatatttttgttatattttttattggtttgataaaataaaatgaatattccagtatataaatatatgagttgattgaaatatccataatatttcaatcaaccatattttataagtatttaacatgtctgtaaaaaaaagaaatctaatagaacttttaacgttattattaatactgatgatagatggcatcgcatgtacgtgtataaaataaaaattgaatactgcaaatgaaagagaatatacataatattatgtacatagtttggaaatagtatatttgtttgaaacgatttatactaacagtaatc

SEQ ID NO: 445 - DNA, 579 bp, Diabrotica virgifera
  misc_feature (1)..(579): RNAi target sequence
cgccatttttgttttcgtagttggaggcgatgtagggaactcaatcgattcatacaaaacttttactggaatgaagcatttcagcggaaacctcatgtttctgtcctgagccgtttagaagttgtacgtagttgaaatgggggaaaatataagtggacacccggtataatatgcagatgaatgtagaaaaaacacaatatttatgcctaggtgaagattcaactgatatgatattggacaatataatcagaaaataactagttgtggtaaatataagtatttgggaattaatttcagcaaagaagatgcggacgatgcagaaattaagagcacagtcaataaagaaagaacgataattagagatataattaaatcattgaacggagttttgtggagtaccaagatagagaaacaaagaaaaatgagaatatacaacaccatgattaagagcacattggtatagggatccgaaacatggagagtaaaggaacaccaaaaaagtaaaatagaagctaccgagatggacgccctaagaagagcaagtagaacatcgagattggaccgggttagaaatgagta

SEQ ID NO: 446 - DNA, 22 bp, Artificial Sequence
  primer
  misc_feature (1)..(22): forward primer
cgccatttttgttttcgtagtt

SEQ ID NO: 447 - DNA, 22 bp, Artificial Sequence
  primer
  misc_feature (1)..(22): reverse primer
tactcatttctaacccggtcca

SEQ ID NO: 448 - DNA, 628 bp, Diabrotica virgifera
  misc_feature (1)..(628): WCRW transcript ta21896.001_diavv
gtaaattcattatttgctttacttactcatttctaacccggtccaatctcgatgttctacttgctcttcttagggcgtccatctcggtagcttctattttacttttttggtgttcctttactctccatgtttcggatccctataccaatgtgctcttaatcatggtgttgtatattctcatttttctttgtttctctatcttggtactccacaaaactccgttcaatgatttaattatatctctaattatcgttctttctttattgactgtgctcttaatttctgcatcgtccgcatcttctttgctgaaattaattcccaaatacttatatttaccacaactagttattttctgattatattgtccaatatcatatcagttgaatcttcacctaggcataaatattgtgttttttctacattcatctgcatattataccgggtgtccacttatattttcccccatttcaactacgtacaacttctaaacggctcaggacagaaacatgaggtttccgctgaaatgcttcattccagtaaaagttttgtatgaatcgattgagttccctacatcgcctccaactacgaaaacaaaaatggcggatttttgaaaaaaactctgttgccc

SEQ ID NO: 449 - DNA, 539 bp, Diabrotica virgifera
  misc_feature (1)..(539): RNAi target sequence
ctatatgagacgaggccagacaccatatggaggagtacatcttgctgatggcgttgtagctgatggtttatgggacgtttacaacaaattccatatgggtaactgcacagaaaacacagcaaagaagctgaacatctccagggctgaacaggatgagtatgctatcaacagttacaagaaaagtgccgaagcatacaaaaacaatgcttttgcttctgaattagtatcagttaatgtaccacaaaggaaaggacaaccagatttggtggtttcagtagatgaagagtacaaaagggttaactttgaaaagtttaacaaactgccaacggttttccaaaaggaaaacggcacagtaacagctggaaacgcttcaactttaaacgacggtgcagctgctttgatcttaaccactgccgaaaatgccaagaggttaaacgctgaacctctagctcgagttgttggttaccaagacggtgaatgtgacccaatcgatttcccaatagcccctgccgtagctattccaaaattgctcgaaaaga

SEQ ID NO: 450 - DNA, 22 bp, Artificial Sequence
  primer
  misc_feature (1)..(22): forward primer
ctatatgagacgaggccagaca

SEQ ID NO: 451 - DNA, 22 bp, Artificial Sequence
  primer
  misc_feature (1)..(22): reverse primer
tcttttcgagcaattttggaat

SEQ ID NO: 452 - DNA, 1541 bp, Diabrotica virgifera
  misc_feature (1)..(1541): WCRW transcript ta05758.001_diavv
ttattgtaaaataagtgttgcagttatttaaaatcgtatgtttataattttttcatattagttgaacaagggtagggtcaaagtttaatccaaagtggtggggaaggagaatactttatcacttatttgttctggaaatattttgagaattgtcgttcacttattttagaagataggcttaaaaatgatcatgtcaaagccaactaaggttattcaaatgagcagaagattctacagctctggctctaaaaacgatattgttattatttctgcagttcgaactccaatgggtacgtttctgggacccttagcacctttatcagctcccagattgggagcagttgccatacaagcagctgttgaacgagctggaattcccaaagaagaagtcaaagaagtcttcatgggccatgtttgtcaaggaggcgctggacaggccccagccagacaggctacagtttttgcaggtcttccaaagtcaacaatatgcacaactgtcaacaaagtatgctcatcaggcatgaaatctgtaatgtttgcaacacagagcttgctactcggcgaccaagacgtcatactagccgggggaatggaatccatgtcgaatgtaccatactatatgagacgaggccagacaccatatggaggagtacatcttgctgatggcgttgtagctgatggtttatgggacgtttacaacaaattccatatgggtaactgcgcagaaaacacagcaaagaagctgaacatctccagggctgaacaggatgagtatgctatcaacagttacaagaaaagtgccgaagcatacaaaaacaatgcttttgcttctgaattagtatcagttaatgtaccacaaaggaaaggacaaccagatttggtggtttcagtagatgaagagtacaaaagggttaactttgaaaagtttaacaaactgccaacggttttccaaaaggaaaacggcacagtaacagctggaaacgcttcaactttaaacgacggtgcagctgctttgatcttaaccactgccgaaaatgccaagaggttaaacgctaaacctctagctcgagttgttggttaccaagacggtgaatgtgacccaatcgatttcccaatagcccctgccgtagctattccaaaattgctcgaaaagaccggagtcagcaaagacgaggttgccatgtgggaaatcaatgaagcgttcagcgttgttgtcttagctaaccaaaaaatccttgggctcaatccagacaaagttaacatccacggaggtgctgtcagtttgggccatcccatcggtatgtctggtgccagacttatcactcatctcgttcactctctcaaggctgaagagaaaggagtcggtgctatctgtaatggaggaggaggagcttcttccatgatgatcgagaaattgtaagtggatcttggatctcagaactgaatcttaggtttaagtgcaaaaatcatatattttttaagaattttagatgtgcatttatgaactgatattataattttataaactattttaaatcctg

SEQ ID NO: 453 - DNA, 603 bp, Diabrotica virgifera
  misc_feature (1)..(603): RNAi target sequence
ggggtgtgtatctctgtgctataagtttagtgtaaatactgtaaccttgaaaattttgaagtaacctgtgttttctagaaaattaaggaaacatcaatgaaactttggatcccaagttgaccttgagcgattatcagatcaccgaaatttacgtggtcggaaaaggaacacacagtcttactcaagcattttccagtagcgacattatggcattaagaaaagaagaagaaaggaaacaaatgcataacaagactggaggaggtgtattcaacttaatttttaggagaggaaaatcgagtatgggttcgggttcaatctccagcgatacacgttctatttcgccgactcacagcgacgattcccgctcagttacaccacctgcagtcattcagcaacctattctgccaccgccgaagcaagatccgcctcccgaacgaccgaaacctccacaacgtaaacggagacccgctccgagacctccgcagctaacccctccacagcaggagatacctaaggaggaaactgccattgatgctgaagattctaaagaatctcgtcgaaattcggaagaaaaaccagcgagcaccgtttcagaagttagtg

SEQ ID NO: 454 - DNA, 22 bp, Artificial Sequence
  primer
  misc_feature (1)..(22)
ggggtgtgtatctctgtgctat

SEQ ID NO: 455 - DNA, 22 bp, Artificial Sequence
  primer
  misc_feature (1)..(22): reverse primer
cactaacttctgaaacggtgct

SEQ ID NO: 456 - DNA, 736 bp, Diabrotica virgifera
  misc_feature (1)..(736): WCRW transcript ta14242.001_diavv
  misc_feature (627)..(627): n can be any nucleotide
  misc_feature (629)..(629): n can be any nucleotide
  misc_feature (630)..(630): n can be any nucleotide
  misc_feature (631)..(631): n can be any nucleotide
ggtgtgtatctctgtgctataagtttagtgtaaatactgtaaccttgaaaattttgaagtaacctgtgttttctagaaaattaaggaaacatcaatgaaactttggatcccaagttgaccttgagcgattatcagatcaccgaaatttacgtggtcggaaaaggaacacacagtcttactcaagcattttccagtagcgacattatggcattaagaaaagaagaagaaaggaaacaaatgcataacaagactggaggaggtgtattcaacttaatttttaggagaggaaaatcgagtatgggttcgggttcaatctccagcgatacacgttctatttcgccgactcacagcgacgattcccgctcagttacaccacctgcagtcattcagcaacctattctgccaccgccgaagcaagatccgcctcccgaacgaccgaaacctccacaacgtaaacggagacccgctccgagacctccgcagctaacccctccacagcaggagatacctaaggaggaaactgccattgatgctgaagattctaaagaatctcgtcgaaattcggaagaaaaaccagcgagcaccgtttcagaagctagtgagttgcagtcgaaaaaaatcgaaacngnnntagtcatctgtcattccggaaatagttcagatagttcaggataccatgaagcatcagttttaagtgacaactgcaacacgtcgttgccacgaaggccaaaatcgg

SEQ ID NO: 457 - DNA, 519 bp, Diabrotica virgifera
  misc_feature (1)..(519): RNAi target sequence
cctcgttggtggagtagtcaattcagcattgtacaatgttgatggaggtcacagggcagttattttcgacaggttcgccggtattaagaaacaagttataggcgaaggtacacatttctttataccttgggtacagaaacctattatctttgatgtacggtctcgccctagaaatatcccggtaataacaggtagcaaagatctgcaaaacgtaaatatcacactccgtattctcttcagaccagttccagacgaattaccaaagatctacacaattttaggccaggattatgaagaaagagttttaccatcaatcactaatgaagtcctaaaagctgtggtggcacaattcgatgccagtgaactgattactcagagagatgtagtttcccaaaaagtcagtgaagatttaactgaaagagctactcaatttggtgttatccttgatgatatatcattaacccacttaacctttggtagggaattcacacaagctgtagaattgaaacaagttgccca

SEQ ID NO: 458 - DNA, 22 bp, Artificial Sequence
  primer
  misc_feature (1)..(22): forward primer
cctcgttggtggagtagtcaat

SEQ ID NO: 459 - DNA, 22 bp, Artificial Sequence
  primer
  misc_feature (1)..(22): reverse primer
tgggcaacttgtttcaattcta

SEQ ID NO: 460 - DNA, 1170 bp, Diabrotica virgifera
  misc_feature (1)..(1170): WCRW transcript ta06694.001_diavv
cacaaatctaaatcggcattttgatcatcaattttgtggttttttattataaattcagctgttaggttgaaaaatatttcagtctaaaaattacgttataaaagacatcgaaatcttcgatcgattataaccataaaagcattttagtttgtttgcatttttacataacttaacctctcatagtgaacttcacatgtaaagatgtctgcagctcaaattttcaacagaatcggccaagttggtctaggaatagccctcgttggtggagtagtcaattcagcattgtacaatgttgatggaggtcacagggcagttattttcgacaggttcgccggtattaagaaacaagttataggcgaaggtacacatttctttataccttgggtacagaaacctattatctttgatgtacggtctcgccctagaaatatcccagtaataacaggtagcaaagatctgcaaaacgtaaatatcacactccgtattctcttcagaccagttccagacgaattaccaaagatctacacaattttaggccaggattatgaagaaagagttttaccatcaatcactaatgaagtcctaaaagctgtggtggcacaattcgatgccagtgaactgattactcagagagatgtagtttcccaaaaagtcagtgaagatttaactgaaagagctactcaatttggtgttatccttgatgatatatcattaacccacttaacctttggtagggaattcacacaagctgtagaattgaaacaagttgcccaacaggaagctgagaaagctaggtttttggtagaaaaagctgaacagacaaagaaagcaactgtaatctcagcggagggtgatgcccaagctgctgtgcttcttgccaaggcttttggtgatgctggagaaggtttagtagaactgagacgtatagaagcagctgaagatatcgcataccaactatcaaggtcaaggcaggtttcctacttgcctggaggacaaaatttgttgttgaatgtgccaacacctggtaattagatggatagagtaacaaacaaaattggagctagttgattatttggctctatgaatgagagagttgcccatttagcttttatggttctattattttttataaaagtatgttaataaattgttgataaattttaaaaaaaa

SEQ ID NO: 461 - DNA, 602 bp, Diabrotica virgifera
  misc_feature (1)..(602): RNAi target sequence
gggaagactcccaagatatggtcgacgagtccacagatcacgtttccagaacgaacgaaaaatcgacgatattcgaccaggttaaacagtttttaaagaataaccatcaaattcctggcatggcagatttagaagctaagcaagaagaagttttaaaacagcttgcagacctcaagaaacaaattctctcaattaaattggatttgaaaattaatgcaaactcagtaggaacaaacaagacctgtccaagtatttcagcagaaaagctgaatgctcttcctgatcttgttgtgaatgcaagtccaacaaatccgccatattcattactgataattcaaaagctactacgtgacattgtcgaattgaaggttacatcccatatacactcctcagttccaacattgaatgaaaatgccaaacagctgggtgactcattggcaagttacgtaccgaaacgtggtgtaccaagtgttaacattaaattgatatggaaaaatgtgggcatcgacacagaactcatagtatcacacgttccaatttttggagaagtcaacttattacggtatctaaccagggtaatcagttccccactcagatacagt

SEQ ID NO: 462 - DNA, 20 bp, Artificial Sequence
  primer
  misc_feature (1)..(20): forward primer
gaagactcccaagatatggt

SEQ ID NO: 463 - DNA, 23 bp, Artificial Sequence
  primer
  misc_feature (1)..(23): reverse primer
actgtatctgagtggggaactga

SEQ ID NO: 464 - DNA, 1170 bp, Diabrotica virgifera
  misc_feature (1)..(1170): WCRW transcript ta07588.001_diavv
taattatgtaattaggctgagtaaatatgaagttttgcctcttttaaggataacatacaatatcatctggacccctttttaagaacgccagtgaaaaattatttagcagacgaagactgattaccaaaaaaattatatatcgaatttctaaagttaattgtaacattttagcgaagaaaaatgaatgggccgataaaaatgtatcgaacacgacaaataattcaccacgaccaaaagattgacaagccgaagtgtatgtatgctttaaaaaatatctactcaaaagactcccaagatatggtcgacgagtccacagatcacgtttccagaacgaacgaaaaatcgacgatattcgaccaggttaaacagtttttaaagaataaccatcaaattcctggcatggcagatttagaagctaagcaagaagaagttttaaaacagcttgcagacctcaagaaacaaattctctcaattaaattggatttgaaaattaatgcaaactcagtaggaacaaacaagacctgtccaagtatttcagcagaaaagctgaatgctcttcctgatcttgttgtgaatgcaagtccaacaaatccgccatattcattactgataattcaaaagctactacatgacattgtcgaattgaaggttacatcccatatacactcctcagttccaacattgaatgaaaatgccaaacagctgggtgactcattggcaagttacgtaccgaaacgtggtgtaccaagtgttaacattaaattgatatggaaaaatgtgggcatcgacacagaactcatagtatcacacgttccaatttttggagaagtcaacttattacggtatctaaccagggtaatcagttccccactcagatacagttctgactctgatagtgtagaaatcgattcgatattagacacttgttatcttcttctgagagctaaaacgaaaactgaaaaggcaggacatattgccacattaaataaatccttaggaaaatcccaatggttagcaggtagaagtaggcatagtctgggggatctagccgcatactctgcccttaaacaggttacaagtggtagtgaaattaatgcaaatatgacgaagtggtatcagcggtgtgaaactgttgtataaaattatttttgttataaatataagctttaa

SEQ ID NO: 465 - DNA, 508 bp, Diabrotica virgifera
  misc_feature (1)..(508): RNAi target sequence
caaaacgaatgtgttgagtgtgtttttgtggatatggttctggttaataaggcgcttgatttatctcatagataacataatttttgttaaaactggtataactgctgattattattattctctttgtcaacaagagtgttacgtatagtgttatgtatagaacattcacgaagggttgcttcagcttccggtcagaccatgcccgtcttacccacgacccacgatgaggtagcaagacatgatttcgacaccgtcaccatcgattcatatggaatgagccccttggccttgcagaaaattagggagcagatggctttgagcctggagcgaaccaagcagttggaggaccagatcaagagcatgcacaaattggaggaggaggtcaacttcctgaaggatgaaaattgtaggttacgaaacagtttgaaatcagaaaacggaaaaaaccaagccacaataaatgacaattatatcgaacattacaaacgacagaggtctcaatcattca

SEQ ID NO: 466 - DNA, 22 bp, Artificial Sequence
  primer
  misc_feature (1)..(22): forward primer
caaaacgaatgtgttgagtgtg

SEQ ID NO: 467 - DNA, 22 bp, Artificial Sequence
  primer
  misc_feature (1)..(22): reverse primer
tgaatgattgagacctctgtcg

SEQ ID NO: 468 - DNA, 3569 bp, Diabrotica virgifera
  misc_feature (1)..(3569): WCRW transcript ta01520.001_diavv
ggggaactgtgttttgttcaacaaaaaataagtacctgtcacaaagtacatatatggagaacataaacaaaacgaatgtgttgagtgtgtttttgtggatatggttctggttaataaggcgcttgatttatctcatagataacataatttttgttaaaactggtataactgctgattattattattctctttgtcaacaagagtgttacgtatagtgttatgtatagaacattcacgaagggttgcttcagcttccggtcagaccatgcccgtcttacccacgacccacgatgaggtagcaagacatgatttcgacaccgtcaccatcgattcatatggaatgagccccttggccttgcagaaaattagggagcagatggctttgagcctggagcgaaccaagcagttggaggaccagatcaagagcatgcacaaattggaggaggaggtcaacttcctgaaggatgaaaattgtaggttacgaaacagtttgaaatcagaaaacggaaaaaaccaagccacaataaatgacaattatatcgaacattacaaacgacagaggtctcaatcattcacaaacgtaaacaatttggagatctcaatgcgaaaagaatcatccccaccacctccaccaccacgaaaagattttggagtgatgtgtggggtgttgacgaggaacataggagtaggcaatcagacacctaacacaaagaatgtttctacggctacttttgaaaatgaattcgctgataagtggctgccagaaaaggtcaaatttcttaacaatcagaacttgaagtcatctagtaaaatcacgatatcaaaagaaacgcaaaccctaggacaaaagtcaagctcagataaaggtgtccaattccaaacaaagagtcctacagtgcctaagttcagcacctacacgcaaactacaacaactaaaaaacaactagtggataaagggatcttagcaactgtcaaagtatctcatatttctgtccagaaatgtgttgaatgttactctattggcacttcagatgacacagtaaatgatatcatttgcgaaaaatgcaatgctacaaaaaagatctatagcaataggtcctgaatctaatgaagatagccatacgtcgcctatatccttagcgtcccttaacttaagaagcaaatcgttcaatatgggcgaagatcgacttaaccttaccactagaacccgttccatagcatcacagtacgaatctagtagcatcagcagagcttgtcaggcgaaacttaagaaggattcttctacgaaatcttgccaagctgaaacgaaaatgactgacaaaaacacccagtacgtaaattacactgtctcaaggcataccgacactcaagactttataacaccaaagaaaaacgtcagttgcgaagcagttgaacaaaaaccggaaaccattgaggtggcttgtaataccgcgactgatttgctgacctgcgtcaaatgtgaaaaagaaaaagaaaaggaggcgctgaagaaagacggaggcagccccactccatctagaataccgcgaccacaaattccgactactcccgtagaaaatagaaagtttaggagacaagatacttatactaaagtatattcaccaactgagaaagctacatcacctactagtccaagattgtctggtttagatctatcacctaaagtcatatcaaacgattcaaatcccttagataaagttaaaagtaacctcaaactagtagaaccaataccacatgctcaaaatggtgtcaatttcacagcgcctattaccaaagttcaaattcaagaaattacactgccaacttcagaatctgttttccaacccattacacaaaatcaaaataggaaaaaagtcatgccaagtaaggaaatgcagggtgcaatgaaagtcctgaacgatcatcttatgaagaacccttccaaaaacatcaagaacccaactgctgaaaatattattcaaacagaatggttcaaaatctcgagctcagtaacagccaatccattggaagtggaggattacctggatgctttcgaagacgtgtccagcttgttactggaatacatagtaaacatgagtgattatagtgggaacacagccatgcactatgctgtttcccatggcaactttgatgtcgtatccattttgttagattctaaagtttgtgatatcaataaacaaaataaggctggatatacaagtgttatgttagtttctttggcggaagttcggtcccaaacacatgccaacgttgtccgaagactgttccagttagctgatgtgaatattagagcgaaagagcatggtcaaacagcactgatgttagcagtaagccacaataggttgaacatggtcaagatgttgttggaagcaggtgcagatataaatattcaggacgaagatggcagtacggcgttaatgtgtggtgctgaacacggccatatcgaaatagttaaacatttcctttcccaacctgactgcaattcgaccattatggatatggatggcagcacagctctagcaatagctatggaagccggtcaccgacacatcggagtcctgctctacgctcatgagaggaatagccaaaagtctcataacgtgaagttaaaaaaagcaaaatcaacaaatagtccgaaaaccccttcctcaccactggctgcaagaagtagccatcgtgccttaacagatacgaaacctaaatagtactaacccatttctaactgtgttttaacttaagaaggtaatgcgtgttgtttcgctgttaacgattctgttaaccatcgtgatgtattcatatacgatggttctagatttttggcatgtaaaatgcatgtttattcagtgtcatcaagatagggaacccaaagttattcatccggtccaaacaactctatctagatgaacatattcttatgtataatggaaaagaatcttagtcgatatatggcctggcgcaaatttgacccaaccgagacacaatacactccggggccacggatgacccttgcatttatttttctactgcagcgcatattgaacccaaccgtgggctgtcgccgtggccagttgctaaaatgtagtgatgttgattatagttattttcaagtatctatgtattcgttacttttgtgtaaagtaataatttacattattcgttacattgattactatgaatacttcgaatatttatgtatttcactaacagtaatcatatagaaaatcggaattcctcagtattttgaatataccttacaatattgtaacacaagtgagcgcttccaacaaatttaaacatattttaagtgatatgcgttactattgataatacaaaaataaaaaccgtgaatacataaaaacaatacaatatataataaaacaatgaaatacataaaaacaatgaaatacatgtaaaattaaagttgttgattatagtgtagatacattatcatttccacatatttttagtcaatctaaagctattttttatctaagactaataatatacaaccgcgtaaccaggatgatcctaagggggggggggttacg

SEQ ID NO: 469 - DNA, 525 bp, Diabrotica virgifera
  misc_feature (1)..(525): RNAi target sequence
gggaaccatctgataccattgagaatgtcaaagctaagatccaagataaggaaggtatcccaccagaccagcaaagattgatctttgcaggaaaacagctagaagatggtagaaccttgtctgactataacatccagaaagagtccactcttcacttggtactgagattgagaggaggtatgcagatcttcgtcaagacactaactggaaagactatcactttggaagtagaaccatctgatactattgagaatgtgaaagctaagatccaagataaggaaggtatcccaccagaccagcaaagattgatctttgcagggaaacagctagaagatggtagaaccttgtctgactataacatccagaaagagtccactcttcacttggtacttcgattgagaggaggtatgcagatcttcgtcaagacactaactggaaagactatcactttggaagtagaaccatctgataccattgagaatgtgaaagccaagatccaagataaggaaggtatcccaccagatc

SEQ ID NO: 470 - DNA, 20 bp, Artificial Sequence
  primer
  misc_feature (1)..(20): forward primer
gaaccatctgataccattga

SEQ ID NO: 471 - DNA, 22 bp, Artificial Sequence
  primer
  misc_feature (1)..(22): reverse primer
gatctggtgggataccttcctt

SEQ ID NO: 472 - DNA, 703 bp, Diabrotica virgifera
  misc_feature (1)..(703): WCRW transcript ta21603.001_diavv
gcacgaggcttggtacttagattgagaggaggtatgcagatttttgtcaagacattgactggtaaaactatcacattagaaggggaaccatctgataccattgagaatgtcaaagctaagatccaagataaggaaggtatcccaccagaccagcaaagattgatatttgcaggaaaacagctagaagatggtagaaccttgtctgactataacatccagaaagagtccactcttcacttggtactgagattgagaggaggtatgcagatcttcgtcaagacactaactggaaagaccatcaccttagaagtagaaccatcagataccattgagaatgtgaaagctaagatccaagataaggaaggtatcccaccagaccagcaaagattgatctttgcagggaaacagctagaagatggtagaaccttgtctgactataacatccagaaagagtccactcttcacttggtacttcgattgagaggaggtatgcagatcttcgtcaagacactaactggaaagactatcactttggaagtagaaccatctgataccattgagaatgtgaaagccaagatccaagataaggaaggtatcccaccagatcagcaaagattgatctttgcaggtaaacaattggaagatggaagaaccttatctgattataacatccagaaagagtccactcttcatttggtactta

SEQ ID NO: 473 - DNA, 653 bp, Diabrotica virgifera
  misc_feature (1)..(653): RNAi target sequence
  misc_feature (623)..(623): n can be any nucleotide
gatcagctaagaggctgacaccacgccattttgctttgagaacacgtttttggattttatatacagtaaattagtctattaatttatcaaaatgtctggagaagaaacatctgccgatagaaatgttgagatatggaaaataaagaaacttataaaaagtttggaactagcaagagggaatggaacaagtatgatctcacttataattcctccaaaagatcaaatatctagagtaagcaaaatgttagctgatgaatttggtacagcctctaatattaagtctcgagtaaatagactttcagttcttggtgctatcacatcagtccagcaccgtttaaaactatataccaaggtccctcctaatggattagtcatttactgtggaactattgtaactgatgaaggaaaggaaaagaaagtaaacatagactttgaaccattcaaaccaattaatacctcattgtatttatgtgacaataagttccatacagaagccctgacagcattattggcagatgataataaatttggttttatagttatggatggtaatggtgcattattcggtacactacaaggaaacacaagggaggtacttcacaagtttactgtagatttacccnagaaacacggtagaggaggtcagtctgcac

SEQ ID NO: 474 - DNA, 22 bp, Artificial Sequence
  primer
  misc_feature (1)..(22): forward primer
gatcagctaagaggctgacacc

SEQ ID NO: 475 - DNA, 22 bp, Artificial Sequence
  primer
  misc_feature (1)..(22): reverse primer
gtgcagactgacctcctctacc

SEQ ID NO: 476 - DNA, 2829 bp, Diabrotica virgifera
  misc_feature (1)..(2829): WCRW transcript ta00933.001_diavv
aaacaatttagggtggatttgaaattaaatttaatcaaaatttggtggacaaaataaaatcccaattttcaaatttttgttttttatgacagatatctgaactgaattatcaattggatatgccaaatcacctaaacagaatattgttctttacctgaatttacagttaaggccgtgaatatccagttaaaaccagttggtttcagttaataactagtgaaaagtgactttcctggatcctcttgttgatcagctaagaggctgacaccacgccattttgctttgagaacacgtttttggattttatatacagtaaattagtctattaatttatcaaaatgtctggagaagaaacatctgccgatagaaatgttgagatatggaaaataaagaaacttataaaaagtttggaactagcaagagggaatggaacaagtatgatctcacttataattcctccaaaagatcaaatatctagagtaagcaaaatgttagctgatgaatttggtacagcctctaatattaagtctcgagtaaatagactttcagttcttggtgctatcacatcagtccagcaccgtttaaaactatataccaaggtccctcctaatggattagtcatttactgtggaactattgtaactgatgaaggaaaggaaaagaaagtaaacatagactttgaaccattcaaaccaattaatacctcattgtatttatgtgacaataagttccatacagaagccctgacagcattattggcagatgataataaatttggttttatagttatggatggtaatggtgcattattcggtacactacaaggaaacacaagggaggtacttcacaagtttactgtagatttacccaagaaacacggtagaggaggtcagtctgcacttcgttttgcccgtctgagaatggaaaaacgtcataactatgttcgaaaagtagcagaagtagctacgcaattatttataacaaatgacaaacctaacatagctggactcatcttggcgggtagtgccgattttaagactgaacttagtcaatctgatatgtttgatccaaggttacaagctaaagtaatcaaactagtagatgtctcgtatggtggtgagaatggatttaatcaagccatcgaattagcagctgaatcacttcaaaatgtaaagtttattcaagaaaagaaactgataggcagatatttcgatgaaattagccaagatacggggaaatactgttttggagttgaagatactcttaggggcttggaattaggtgctgtagaaacactaatctgttgggagaatttagatattcagcgatatgtattgaaaaaccatgctacaggttcggaaactatactgcatttaactcctgaacaagaaaaagataaatcacatttttcggataaagagactggtgtagaattggaattggtcgagtgtcaacctcttcttgaatggttggcgaataattacaagaacttcggtgccactttagaaattattacagacaaatctcaagagggctcccaatttgttcgagggtttggtggaattggaggtttgctccggtacaaagtagacttccaaagtttacaactagacgatatggataacggcgaagaatttgatctagatgattattaaatgtagagacaaatttgtagaaattttcatttaaaacaatgtgggcccgttatgtaataaacacgtgtaaaaagtaaatgatggcaatatactaatttatcctaaaggagtataatatgatgtgcttttttgtaatattatttccaaatttatgctttcacaaacttgaaagtttattccatgaaaagttttaattatatcattaaattaataagtattattgattaattttatttattgattaatctatgttagtaaaatgtacaaagcacaaagataaagatagttaggataaccctttacaccaactgaaagtatagaaatttccggattgtttggtacggcaacaaacaaattcacacgaaattccaaatttgataatgtctactacagttgaagatgacaatagataattccagaccacgacctatacgctcagaaaacaatgtaccattacaaaacggctgcgaaagcctacattcatacttgattcgtatacatactgtccatgggcgctcatacccatgggcagggtagggggcgtggccccctggcttttcgggtgctttaaactatatgtcgttatccaaagtatacatacctaaggtaatgtgcaacatcttcacgtctgccctccccctaaaaatttttatatgggcgcccgtgatactgtcctaagttacacatccatttttgtccacgtgtgtgaccaggagcgccattaccaacggttcccaagactgagagtcatagcttactcggagcagtagggatttaaagaagaaaaaacgagctatgtacttgtcagtgtgtcggatcacacacagatcggtttagtagtttgtataaattatataaaataaaaatgtagatttggaaataatattacaataatatcggagtgatcatgtgttttgtataaattatattgtctcaaaaaatgtttaccgatatttattatttaattgttaaaattatgtatgtatattgcaagtgtttataattaatagtgaaaaagaccagtatttctacagtggcttgtttttttcattggtttttatatatttagaacagaatattttttgtatttactttttttgttaacgaggtaataaatcaggtttggaaattcttcattctattttagtttgtaaccattggcatttttgttttt

SEQ ID NO: 477 - DNA, 577 bp, Diabrotica virgifera
  misc_feature (1)..(577): RNAi target sequence
ctgactctgttcattggggagtggttgaaaggggtgttttttggagttattccattatttgaaggagtgataaagaagatcttggaagccaccatagacttaattcacatagaaccagcatactttctgatcaccaagaagaaatgactgagtattggttgatatctgccccaggggataagacctgtcaacagacatgggacacgatgaataatatgacaagtaaacagaataatttgtcaaccaactacaagtttcaaatcccggacttgaaagttggtactctggatcagttagtaggactttctgatgatctgggcaagcttgatgggttcgtggagcaggttaccaggaaggtagctcagtaccttggagaagtacttgaagaacagagggacaagtggtcagaaaacctgcaggccaataacagcgatttgcccacttatttaacccgatttacttgggacatcgccaaatatcccatcaagcaatcgctccgtaacatcgccgatataatcagcaaacaagttggccaaattgacgctgatctgaagaccaaatcgtctgcgtacaataa

SEQ ID NO: 478 - DNA, 22 bp, Artificial Sequence
  primer
  misc_feature (1)..(22): forward primer
ctgactctgttcattggggagt

SEQ ID NO: 479 - DNA, 22 bp, Artificial Sequence
  primer
  misc_feature (1)..(22): reverse primer
ttattgtacgcagacgatttgg

SEQ ID NO: 480 - DNA, 2409 bp, Diabrotica virgifera
  misc_feature (1)..(2409): WCRW transcript ta01215.004_diavv
ggtgaaacttcaataacgatcagctgggctgactctgttcattggggagtggttgaaaggggtgttttttggagttattccattatttgaaggagtgataaagaagatcttggaagccaccatagacttaattcacatagaaccagcatactttctgatcaccaagaagaaatgactgagtattggttgatatctgccccaggggataagacctgtcaacagacatgggacacgatgaataatatgacaagtaaacagaataatttgtcaaccaactacaagtttcaaatcccggacttgaaagttggtactctggatcagttagtaggactttctgatgatctgggcaagcttgatgggttcgtggagcaggttaccaggaaggtagctcagtaccttggagaagtacttgaagaacagagggacaagtggtcagaaaacctgcaggccaataacagcgatttgcccacttatttaacccgatttacttgggacatcgccaaatatcccatcaagcaatcgctccgtaacatcgccgatataatcagcaaacaagttggccaaattgacgctgatctgaagaccaaatcgtctgcgtacaataacttgaaaggaagtcttcagaatttggagaagaaacagacaggaagtttactaacaagaaacttggcagatttggtgaaaaaggaacattttattttggattctgaatatttgcagacattgttggttattgttccaaaagcccaattcaacgaatggaatgcgacatacgaaaagattaccgacatgatagtccctcgttcttcacaactgattaaacaggataacgaatacggtctatatactgtatccctattcaaaaaggtcgtcgaagaattcaagttacacgctagagaaaagaagttcatcgttcgtgatttcatatataacgaagaggaactggcagctggaaagaacgagataaccaaactcgtcaccgataaaaagaagcaatttggtccattagttagatggcttaaagtcaacttcagcgagtgtttctgcgcctggattcacgttaaagcgttgagggtatttgttgaatctgttttaagatatggcctccccgtcaatttccaagctattttaatccaccccaataagaaacaattaaaacgtttaagagatgtcttgaaccaactttacggccacctcgatagtagtgctgccctttcaggacctaacgttgatagcgttgacattccaggcctcggattcggccaatcagagtattacccatacgtttactacaagctgaacgtcgacatgttagaatcgaagatctaaactcacgcatcaatccaagagtttgttattaataggttccaaacaattttaaaaaaacgtactacagatacaaatagtatatttttgattactcactctttcgaggggctgttttaatgtcggtatttttaagttttgtccttactcaatgtccatttagtaccccgtcattgtatgtaaattaattaaaaatgcgcaacaaaaaatgtagaacttttttttattttaaaatgcatttaaaattcgtttaacgatgatataattgctttaatgtatcatgtaatactccgattgaacatataaatcgttattaatattatttcttgttgataatacaaaagagaccatattattagaaactgcattcgaaaaattaaaaaaatgatagatattatgacgcgtagatgagctgacaagtgacgtgttaagatgtattgatatctaaacatgaaatttcaacaaaccatctatgttatagatgtacatatgtttcgtaaaattgacgaaaagctggaaatagattacatataatttgtcataaaatatttgcgtcagagacttgaggttgtgatacaatatatatttactcctacagaatatttgttgaatattaccgacaccattaaaataccttatccgttatgattgtagataaataatttactctgaatttaatacaaaacgatgtcataatttcaattgtacttgttctaataatataactacttatcgaaaaagaatagaaatttattataaaattgtgtgaaatgactgggtattataggattgccccaacaaaatattttagatgtagtatgatgcttcatcagtgacaatatatttgacgtgttttattatgggccactctttaatgtaaaccagtattgatttattgtaaataaatattgtatatatactacaaaccaataaaatattttgccttttgaatctatttataaaagatgattccatattgtaatatagttcaattagttgactactttttttgaatttatttcagaaataattttaagtggttatttgttcaatgtaattgttagaaaataaaaactattccaa

SEQ ID NO: 481 - DNA, 689 bp, Diabrotica virgifera
  misc_feature (1)..(689): RNAi target sequence
  misc_feature (338)..(338): n can be any nucleotide
  misc_feature (551)..(551): n can be any nucleotide
gggcttctttctgtggttaagtccaaaatggcaccgacagctgacaaaactaaaacggttaaagggctccccgcagtcccagaatcagtcttaaaacaccgtaaaagacgtgaagcatcccgtgctaaacaactccagtctgtcatcaaaaagaaggcagaacagatcaaaaagaggaaagatattttcaaaagagctgaacagtatgttaaggaataccgtttaaaagaaagagacgaagttaggctagttagacaagccaaaaccagaggaaatttctatgttcctgctgaggctaaattggcttttgttgttcgtattaagggtatcaataaagnagcacctaaagtacgcaaagtactccaactattccggttacttcaaatcaacaatggagttttcgttaagttgaacaaggctactattaacatgcttaggatatgcgaaccttacattacatggggatatcctaacttaaagtcagtaagagaattaatctacaaaagaggatttgccaaagttaatggacagcgtgtagcaattaccagcantcaaatcgttgaagacaggttggggaaaatctggaatcatttgtgttgaagatttaatccacgaaattttcactgttggacctaagttcaaatatgcctccaacttcttgtggcccttcaagctaaacacacccactg

SEQ ID NO: 482 - DNA, 20 bp, Artificial Sequence
  primer
  misc_feature (1)..(20): forward primer
gcttctttctgtggttaagt

SEQ ID NO: 483 - DNA, 22 bp, Artificial Sequence
  primer
  misc_feature (1)..(22): reverse primer
cagtgggtgtgtttagcttgaa

SEQ ID NO: 484 - DNA, 855 bp, Diabrotica virgifera
  misc_feature (1)..(855): WCRW transcript ta05864.001_diavv
ggggggcgtgtggggggtctttctgtggttaagtccaaaatggcaccgacagctgacaaaactaaaacggttaaagggctccccgcagtcccagaatcagtcttaaaacaccgtaaaagacgtgaagcatcccgtgctaaacaactccagtctgtcatcaaaaagaaggcagaacagatcaaaaagaggaaagatattttcaaaagagctgaacagtatgttaaggaataccgtttaaaagaaagagacgaagttaggctagttagacaagccaaaaccagaggaaatttctatgttcctgctgaggctaaattggcttttgttgttcgtattaagggtatcaataaagtagcacctaaagtacgcaaagtactccaactattccggttacttcaaatcaacaatggagttttcgttaagttgaacaaggctactattaacatgcttaggatatgcgaaccttacattacatggggatatcctaacttaaagtcagtaagagaattaatctacaaaagaggatttgccaaagttaatggacagcgtgtagcaattaccagcaatcaaatcgttgaagacaggttgggaaaatctggaatcatttgtgttgaagatttaatccacgaaattttcactgttggacctaagttcaaatatgcctccaacttcttgtggcccttcaagctaaacacacccactggtggatggcgtaagaagactaaccactatgttgaaggaggtgactttggtaatagagaagatagaattaatgaacttctcagaaggatggtttaaaccaatttgtttataaaataaattatgtataaaacacaaaaaaaaaaaaaaaaaatgcga

SEQ ID NO: 485 - DNA, 327 bp, Diabrotica virgifera
  misc_feature (1)..(327): RNAi target sequence
acacttacacccttcaaaaactcatttataaactaaaaatgggtgcatctgtaattcctttcatagttttcactgtattatggggaggagttggagctgttctacccatttttgtacctaaaggacccaatagaggaattatccaagttattcttatgataacaggtgtgtcgtgctggttgttctggctgtgttgttacgtagctcaaatgaatcctctgatcggtcctaaactagaacaaaacatcgtgctgattatggcaaaacaatggaaatatgcattaccatcgtcagcttgaatgaaggtgtgagtgaccattccatctg

SEQ ID NO: 486 - DNA, 24 bp, Artificial Sequence
  primer
  misc_feature (1)..(24): forward primer
acacttacacccttcaaaaactca

SEQ ID NO: 487 - DNA, 22 bp, Artificial Sequence
  primer
  misc_feature (1)..(22): reverse primer
cagatggaatggtcactcacac

SEQ ID NO: 488 - DNA, 656 bp, Diabrotica virgifera
  misc_feature (1)..(656): WCRW transcript ta06727.001_diavv
ttcaaggagtggttagattgtatgcactgaatttctgaaggcagatgattttgacagattttagtttactctacttgtaaagtgaaaatctattcacgtgaattattttacacttacacccttcaaaaactcatttataaactaaaaatgggtgcatctgtaattcctttcatagttttcactgtattatggggaggagttggagctgttctacccatttttgtacctaaaggacccaatagaggaattatccaagttattcttatgataacaggtgtgtcgtgctggttgttctggctgtgttgttacgtagctcaaatgaatcctctgatcggtcctaaactagaacaaaacatcgtgctgattatggcaaaacaatggaaatatgcattaccatcgtcagcttgaatgaaggtgtgagtgaccattccatctggatagtgtgtagaaatttcaaattgcacagctattgcattgtattatatttattattaatttcctttttgtgatcatccaatatctgtatgtagtatgttttaaagtgatgtgtataatattgattattgtttatatactatcatcaaaaccaaccattaattgtaaaaaaaatattgttgaattaaattaatttgtcagttaaaaaaaaaaaaaaaaaa

SEQ ID NO: 489 - DNA, 526 bp, Diabrotica virgifera
  misc_feature (1)..(526): RNAi target sequence
tgtatttgtgactggaaaaggaaattagagccctatacttacagttaaacgcttataaatttgtagcaagtattttatctttacaaaagaaagtttatttcttaacattgtagttttatatttttattacaaatggcaactggaactactttgcaaaaagccattgagttagtcaccaaagccaccgaagaagacagaaacaagaattatgaagaagcccttcgtctatatgaacatggagtagagtactttctacatgccattaaatatgaagctcagggtgacaaagctaaggagagcattagggccaaatgtgtacagtatctagaaagggcagaaaaaattaaagaatctgtaaggaaagggaagaagaagccagttttagatggaggttcttcaaaggaagacaaaaagagtgatagtgatgaaggtgacgaagatgatcctgacaaaaagaagttacaaagcaaactggaaggggccatagttgtagaaaaaccacatgtcaaatggagtgatgtggcag

SEQ ID NO: 490 - DNA, 24 bp, Artificial Sequence
  primer
  misc_feature (1)..(24): forward primer
tgtatttgtgactggaaaaggaaa

SEQ ID NO: 491 - DNA, 20 bp, Artificial Sequence
  primer
  misc_feature (1)..(20): reverse primer
ctgccacatcactccatttg

SEQ ID NO: 492 - DNA, 2068 bp, Diabrotica virgifera
  misc_feature (1)..(2068): WCRW transcript ta02217.001_diavv
tgtgaagtgtcaaaactgtcaaaagaattatgccaatgtcaaaagtgtaatttggaggggtgattataaaattattcttagacattacaatatttcatataaagtatttatttaaaagatgtatttgtgactggaaaaggaaattagagccctatacttacagttaaacgcttataaatttgtagcaagtattttatctttacaaaagaaagtttatttcttaacattgtagttttatatttttattacaaatggcaactggaactactttgcaaaaagccattgagttagtcaccaaagccaccgaagaagacagaaacaagaattatgaagaagcccttcgtctatatgaacatggagtagagtactttctacatgccattaaatatgaagctcagggtgacaaagctaaggagagcattagggccaaatgtgtacagtatctagaaagggcagaaaaaattaaagaatctgtaaggaaagggaagaagaagccagttttagatggaggttcttcaaaggaagacaaaaagagtgatagtgatgaaggtgacgaagatgatcctgacaaaaagaagttacaaagcaaactggaaggggccatagttgtagaaaaaccacatgtcaaatggagtgatgtggcagggctggaagctgccaaggaggctttgaaagaagctgttatattacctattaggtttccccatttgttcagtggaaagagagtaccttggaaagggattttgttatttgggcctcccggtactggtaaatcgtacttagccaaggctgtagctacagaagcaaacaattcaacatttttttctgtttcgtcgtccgatctcgtttccaaatggttgggagagtcagaaaaattagtcaagaatcttttcgaattggctagagcccacaaacctagtattatattcattgatgaaatcgattctttatgctcatcccgttccgacaacgaatcagagtcagccaggagaatcaaaaccgagtttttggttcagatgcaaggtgtgggccacgatactgaaggtatccttgtcctcggtgctacgaatattccgtgggtattggattctgctattcgaagaagatttgagaagagaatttacatacctctaccagaagaacctgccagagccgttatgtttaaattgcatttaggaaatactcatacagagctaacagatgaagatattaaagagttggcatctaaaaccgaagggtattccggagctgatataagtatcgtagttcgtgacgctcttatgcaacccgtccgaaaagtccaaactgcaactcacttcaagaaggtcagaggtccgtcgccgcttgatcctaataccatcgtagatgatttgttgcttccatgttctcccggagatccgggagctgtggaaatgtcttggatggatatctccagtgataaattagctgagcctcctgttacagtgaatgacatgctgagatcaatcgcaacctccaaaccaaccgtcaacgacgaagatctcacgaaactcaaaaagtttatggaagacttcggccaagaaggataaaatttaggtatacaccagatttactatttaaaagagagattcttgtataatatttgtattcttttaatgcatatatagatcgtaaaaaccacacaaaactttcaacattttgcattaagtgttattagaaaacaaaagattaatgttgttatactgttgctttaatattatttttttaataaattgaatttttcttttttatattacggccttattatacagtaagatagtatatatttgtattcttaatgataaatgaagttaatgaaacatgtttttagaatattcacttgttctttgtatataaaataataaaacaccgattggtttaaaatacttgtattggcttaaagcaagttatctataagcttcaaagacatactcagtgtcttatccgatttctgttactataaacgatctgattcatttatttatctgttgtaattaaaatctgaaataaaatgtcacaatatgtagattgttttccaccttaggattgg

SEQ ID NO: 493 - DNA, 621 bp, Diabrotica virgifera
  misc_feature (1)..(621): RNAi target sequence
gcgattcggtaaaggagaaagtaaccagaattattttagctgttttcaggaatttgatcgaaaaacccgaagatcaacaagtttcaaaagaacattgtatagctatggtgcaatgcaaagtattgaaacaattggccattttagaacagcgcaagttcgatgatgaagatgtgacagctgatgtcgaatttctaactgaaaaactacagagttctgttcaggatctgagttccttcgatgaatattcaactgaagtcaaatctggacgtttggaatggtctccagtacacaagagcaagttctggcgggaaaatgcgcagcgcctcaacgagaaaaactacgaattactccgtattctcattcatttgttagaaaccagcaaggaccccttggtattgagcgtagctagtttcgatattggagagtatgttcgccattatcctcgcggcaaacacataatcgagcagttgggaggaaagcaattagttatgcaactcttagcccacgaagatcccaatgtacgatatgaagctctgttggcagtccaaaaattgatggtccacaattgggaataccttggtcgtcaacttgaaaaagagcaaagtacagataaaaccgcgc

SEQ ID NO: 494 - DNA, 21 bp, Artificial Sequence
  primer
  misc_feature (1)..(21): forward primer
gcgattcggtaaaggagaaag

SEQ ID NO: 495 - DNA, 22 bp, Artificial Sequence
  primer
  misc_feature (1)..(22): reverse primer
gcgcggttttatctgtactttg

SEQ ID NO: 496 - DNA, 1830 bp, Diabrotica virgifera
  misc_feature (1)..(1830): WCRW transcript ta02168.002_diavv
tacttctgtcagtgtcaaaatttatatcacaagacttccagttgggagttgggtcagagttaattttttaggtcttctattaaaagggttgtaattttaatttaaaaaaatggcatccaatttagttgcgggagcaaatcctaaaatacaggatataatgtcgtctttggacgatgacaaaacagatatgttggctgctacaagtgtattgcagcaaagagctacagatataagaaatcaacatgtaaactggcaatcctatttccagtcacaaatgatttcgcaggaagactacaacttcatagtagcttttgatgtgactgatagtgcaaaaagagaagctctcctgaaaagcgacagaaaccaatgtgctcaaacattgttgaaccttttggggcatgtatccaaggaccaaactctgcagtacattttagttttggttgatgatatgttacaggagaacagaagtcgtgtagagatatttcacgaatatgccaaccaaaagaaagaatctgtttggggtccatttttgaaccttcttaaccgccaggatggatttattaccaacatgacttctaggatcatcgctaaaattgcttgttggtcgcagacacttatggatcgttctgaccttcatttttacttgacctggttaaaagaccaactaaaaactcagaacaacgaatacatccaatcggttgcaagatgccttcaaatgatgctccgaattgacgactaccgttttgccttcgtgtccgtcgatggaatatccactctgttgtcggtactctctggaagagtaaatttccaagttcagtaccagctgatattctgcttgtgggtactcactttcaacccgttgttagccgaaaagatgaacaaattcaacgttattcctatattggcagatattttgagcgattcggtaaaggagaaagtaaccagaattattttagctgttttcaggaatttgatcgaaaaacccgaagatcaacaagtttcaaaagaacattgtatagctatggtgcaatgcaaagtattgaaacaattggccattttagaacagcgcaagttcgatgatgaagatgtgacagctgatgtcgaatttctaactgaaaaactacagagttctgttcaggatctgagttccttcgatgaatattcaactgaagtcaaatctggacgtttggaatggtctccagtacacaagagcaagttctggcgggaaaatgcgcagcgcctcaacgagaaaaactacgaattactccgtattctcattcatttgttagaaaccagcaaggaccccttggtattgagcgtagctagtttcgatattggagagtatgttcgccattatcctcgcggcaaacacataatcgagcagttgggaggaaagcaattagttatgcaactcttagcccacgaagatcccaatgtacgatatgaagctctgttggcagtccaaaaattgatggtccacaattgggaataccttggtcgtcaacttgaaaaagagcaaagtacagataaaaacgcgccaaagggtggagctcctgtcgcaggcaaggcgtaaatactaccatgaaaagtatttaaagatatttactgcaataattgtagaaactttaaaaataattgtaaaaattatatcgatttctgtacatagctgtataggtatacattcctgtcatattttattattgttacgataaccaataatcaaccatgcacattttaaacatttaaaaatattgcttttaaagtaacttttttctgattgttagtattataataaagtatatgttgtcgtttaaaaaaaaaaaaaaaaaa

SEQ ID NO: 497 - DNA, 642 bp, Diabrotica virgifera
  misc_feature (1)..(642): RNAi target sequence
gggaacctttttctggaggttaggaaaagtacgtgacattttcactttattttccatacagtttaaacaatattgtattcttgtagttattgcctgaaaataatcactttttaagattagcaatgccagcagctgacgaaataaagtccagctgggctgacgaggtagagttagaaggaggtgccttaccaccacccagtgaagtcttcgaaaatggtttcaagattgtaactgaatataaatacaatgaagacgacaagaaagttaagattgtcaggacgtacaaaattgagaaacgtgctgtgtccaagtcaattgctctccgtaaaacatggaaaaagtttggtgatgttgccaatgataaacctggcccgaatcccgcgactaccatagtagctgaagacgtttatatgcagtacatcactagtaaggaagaagataataagcaggatgatgactctttggacaaactgaaaggaatgggtgataagaaattctttaaatgtcgtacatgtaatggtgaacattggactacaaaatgtccatggaaggacactatgtttgttggtggaaagccaccagatgataagaaaatatcagctgttggaggggcagctgttggtgaagctggtaaacaaggat

SEQ ID NO: 498 - DNA, 20 bp, Artificial Sequence
  primer
  misc_feature (1)..(20): forward primer
gaacctttttctggaggtta

SEQ ID NO: 499 - DNA, 22 bp, Artificial Sequence
  primer
  misc_feature (1)..(22): reverse primer
atccttgtttaccagcttcacc

SEQ ID NO: 500 - DNA, 1014 bp, Diabrotica virgifera
  misc_feature (1)..(1014): WCRW transcript ta06291.001_diavv
cggcaacctttttcttgaggttaggaaaagtacgtgacattttcactttattttccatacagtttaaacaatattgtattcttgtagttattgcctggaaataatcactttttaagattagcaatgccagcagctgacgaaataaagtccagctgggctgacgaggtagagttagaaggaggtgccttaccaccacccagtgaagtcttcgaaaatggtttcaagattgtaactgaatataaatacaatgaagacgacaagaaagttaagattgtcaggacgtacaaaattgagaaacgtgttgtgtccaagtcaattgctctccgtaaaacatggaaaaagtttggtgatgttgccaatgataaacctggcccgaatcccgcgactaccatagtagctgaagacgtttatatgcagtacatcactagtaaggaagaagataataagcaggatgatgactctttggacaaactgaaaggaatgggtgataagaaattctttaaatgtcgtacatgtaatggtgaacattggactacaaaatgtccatggaaggacactatgtttgttggtggaaagccaccagatgataagaaaatatcagctgttggaggtgcagctgttggtgaagctggtaaacaaggatccaaatatgtaccacctaatttgagagatggaggtgtgaagagaactgatggatctggtgtagctaaacgagatgatagttcctgtgctatcagaattgccaatttgagtgaatccacaactgaaactgatttggaagatctggttaaacaatttggaccaattcaaaaactgtatttggcgaaagacaagataactggtggatgtaaaggatttgcttatatacatttcaaattccgttctgatgcagctaaggcaatcgcaatgcttcatggacatggttatgatcatcttattcttaatgttgattggtccaagccatcaccaaattctaaccaataattgtatcaccagatttttgaataataaaat

SEQ ID NO: 501 - DNA, 524 bp, Diabrotica virgifera
  misc_feature (1)..(524): RNAi target sequence
tcaacgtcatctcagtttggtttattgttgggtgtaatgtttaaataaaataattattattttgtaaacctgtgccattaaacaaataaagcgatggtgctaattgcagcagcagtctgcacgaaagcaggcaaaacaattgtgtctcgacaatttgttgaaatgaccaaagctagaatagaaggtttgttggctgcctttcctaaattaattcctacaggaacccagcatacatttgtggaaacagattcagtacggtatgtttatcaacccctagagaaactgtatatggttcttattacagctagagctagcaacatattagaagatcttgaaaccctccgtctattcgcaagagtgattcctgagtactgcaaatctttggatgaaaatgaaattgcagagaatgcattttcacttatatttgcttttgatgaaatagtggcattaggttatagggaaagtgtcaatctgtctcaaattcgcacatttgtggaaatggactcgcacgaagaaaaagttta

SEQ ID NO: 502 - DNA, 22 bp, Artificial Sequence
  primer
  misc_feature (1)..(22): forward primer
tcaacgtcatctcagtttggtt

SEQ ID NO: 503 - DNA, 23 bp, Artificial Sequence
  primer
  misc_feature (1)..(23): reverse primer
taaactttttcttcgtgcgagtc

SEQ ID NO: 504 - DNA, 1812 bp, Diabrotica virgifera
  misc_feature (1)..(1812): WCRW transcript ta03896.001_diavv
cgaagatccttgtcacgtcactgctttttcgtgaagggggggtacacgtcaacgtcatctcagtttggtttattgttgggtgtaatgtttaaataaaataattattattttgtaaacctgtgccattaaacaaataaagcgatggtgctaattgcagcagcagtctgcacgaaagcaggcaaaacaattgtgtctcgacaatttgttgaaatgaccaaagctagaatagaaggtttgttggctgcctttcctaaattaattcctacaggaacccagcatacatttgtggaaacagattcagtacggtatgtttatcaacccctagagaaactgtatatggttcttattacaactagagctagcaacatattagaagatcttgaaaccctccgtctattcgcaagagtgattcctgagtactgcaaatctttggatgaaaatgaaattgcagagaatgcattttcacttatatttgcttttgatgaaatagtggcattaggttatagggaaagtgtcaatctgtctcaaattcgcacatttgtggaaatggactcgcacgaagaaaaagtttatcaggccgtgagacagactcaagagcgcgaggccaagaatatgatgagagaaaaggcaaaagaacttcagagacagaagatcgaagcggccaaaaaaggagggaagacctcgtttggtagtagcggtggctttggcagctcgacaggttatactcctacgccatctgttggtgatgtagctaaccagacaaatgatgttaaaacttcttcatacacaccagcccctgcgcaaaaacctcggggtatgaaattaggtggaaaaggtagagatgtagaatcattcgtagatcagcttaaatcggaaggagaaaacgtcattactccaaacaaaaatagtatttcacagccaggaactaaagctccagctatcaaaactgacatcgatgatgttcatttaagattggaagaaaaattaatagtgagaataggtcgtgatggtggcgtacaacaattcgaattattgggacttgctactttacacattggagatgagagatggggtaggatacgtgtgcaattggaaaatcagaatacccacggtgttcaacttcaaacgcatcctaatgtagataaagaattattcaagctacgctcacagattggattgaaacaaccggctaaaccttttcctctaaatacagatgttggtgtactgaaatggagattacaaagtactgaggaagctctaattccactcttaataaattgctggccttcagaagcgggagatggtagttgcgatgttaatatagaatatgagcttgcccacactaatttggaactagttgatgtcaatattgttattcccttgccaattggatgttcaccaatagttggtgaatgtgatggtatgtacacacacgaagccaagcgtaatcaactggtatggaatttgcctctgattgatgccagtaataaaactggttctttagaatttaacgctcctagggccatacccgctgatttcttcccgctttccgttggattcaattcgaagtcatcctatgcgagtattaagattaccgaagttgtcctagttgatgatgattctcctataaaatattcagtggagaccgcactatatccagataaatatgaagtagtataatggggcagaagtaaagaatcacttgtaaaaattatataactaatattatatcttatatgcaacattgctttttgtacaaaagttaagtaacttgtctttattttatctatattaataaaataagtaagaaag

SEQ ID NO: 505 - DNA, 612 bp, Diabrotica virgifera
  misc_feature (1)..(612): RNAi target sequence
attctgatcccagcacacaaattttgtataaccggacaatggcgcatttgggattgtgtgcatttagacacgctaacattaaggatgcccataactgtttagttgatttgatgatgactggaaaaccaaaggagttactggcacaaggtttgcttccacaaagacaacacgaacgcagcaaagaacaggagaaaatcgagaaacagcgtcaaatgcccttccacatgcacatcaatctcgaactcttagaatgtgtgtatttagtctccgccatgttgatcgaaatcccgtatatggctgcgcatgaattcgacgccagacgcaggatgatttctaagaccttctatcagcagttgcgttcttccgaacgtcaaagcttagtgggacctccggaaagcatgcgagagcacgtcgtcgcggcggctaaagcaatgatgaacggcaattgggcggcatgcaacacttttatcattaacgacaagatgaatgccaaagtgtgggatctgttttaccaagccgaccaagttagatccatgttgacgaaattgataaaagaagagtctttgaggacgtatttgtttacctactcccacgtttacgattcaatttcga

SEQ ID NO: 506 - DNA, 22 bp, Artificial Sequence
  primer
  misc_feature (1)..(22): forward primer
attctgatcccagcacacaaat

SEQ ID NO: 507 - DNA, 22 bp, Artificial Sequence
  primer
  misc_feature (1)..(22): reverse primer
tcgaaattgaatcgtaaacgtg

SEQ ID NO: 508 - DNA, 2785 bp, Diabrotica virgifera
  misc_feature (1)..(2785): WCRW transcript ta05048.001_diavv
caatgactaatgtcacctcgctcttttaactcacgttgcatatgtgaggtattttccaaaattcgagaaaagtttatttagtgttattataataagggaaaacagtaaaaatgagtagatttttcgctggatccgattcagattcggatagctcatccgaagaagagattatccaacgtccccaagtaccagcttatactttcagtgacgatgaggaggaggtaaaacgtgtagtaagatcagcgaaagaaaagcgctatgaagaacttacaaatactattaaacaaatcagaaattttaagaaaattaaggatatgtctagcatgttgaatagttttgaggaattacaaaaggcataccaaaaagctgctcctgttattgtcaaagaagaaaatggccagactccaagattttttattaggtgtttggccgaaatggaagactttattaatgaaatgtgggaagatagagatgggaggaaaaacatgagcaaaaacaatagcaaatcactcacatctatgagacagaagttgagaaaatatttgaaagattttgaagatgacttggctaaatttaaggaaaacccagaacagcctgatgatgaggaagaggaggaaaagcctgaagtagctgaggattccgagaacgaagctccatccaaaaacgcgtttctcaaagctccacccaaacaagttgtagacgacaaagatgaatcgtcagactcggatgactggccatctgactctgaatctagtctgtcatcatctgatgacgacgaaggcaaataccagagcataagggagcgtttcttgaagagaactgggcccgctcacgaagaagatgaagaaagggaaaggagaaaggaggagaaaaggaaggagagaaaggagaaaggtaggaagttgaaaaaggatgaggaggaggatggtgaaggcaagtgggagactgttaatcgaggtttcgccatccctagtgaaaaacctaaaatgttcgccaaggacgccgaaatcgatctaaaccttgtaatcaagaaactcagcgaaatcatggcagctagaggcaaaaagcgcacagatagacgcgaacaaatagaactcctgcacgaactccaaaatgtttctgagcaacaccaattgggagcggctattttcattaaaattaaactcgccatcatatctgccattttcgattacaaccccaaagtttctgacgcaatgaagccggagtattggctgaaattgctggagaggatgagcgaaatgttgggcatgttgttgaatactaccaatctagtagtttctgatggaattactgaagaaatggaaaatcttgaagaacccccgtatcgcattaggggctgtatactaacatcagtggaaagactggatgacgagtttactaaactactcaaagagtgtgatcctcacagtaacgagtatgtagaacggttaaaggatgaatgtaaggtttctagtatcatcgataaaacaatgaaatacttggaaaggagtaacgtatcttccgaactatgtaggatatatttacgaaaaatcgagcatttgtattacaaattcgatcctagagtattacagcaaaaagctgatcctctcgtagtacccaaagacgagatgaactccgtgcaagaaatggagaaactatgcaaatttatctacgcaaaagatagtactgacagattgagaactagagctattttgtcccatatatatcatcacgctctgcatgacaactggttccaagcaagggatttggtattgatgtcacatctacaagaaacgattcagcattctgatcccagcacacaaattttgtataaccggacaatggcgcatttgggattgtgtgcatttagacacgctaacattaaggatgcccataactgtttagttgatttgatgatgactggaaaaccaaaggagttactggcacaaggtttgcttccacaaagacaacacgaacgcagcaaagaacaggagaaaatcgagaaacagcgtcaaatgcccttccacatgcacatcaatctcgaactcttagaatgtgtgtatttagtctccgccatgttgatcgaaatcccgtatatggctgcgcatgaattcgacgccagacgcaggatgatttctaagaccttctatcagcagttgcgttcttccgaacgtcaaagcttagtgggacctccggaaagcatgcgagagcacgtcgtcgcggcggctaaagcaatgaggaacggcaattgggcggcatgcaacacttttatcattaacgacaagatgaatgccaaagtgtgggatctgttttaccaagccgaccaagttagatccatgttgacgaaattgataaaagaagagtctttgaggacgtatttgtttacctactcccacgtttacgattcaatttcgatggccactttggcggaaatgttccagttgggcaaacccgtcgtgcattctattatttctaagatgatcattaacgaagaattgatggcatctttagacgacccgactcaaactgttgtaatgcacagaagcgaaccatcccgtctacaatctttggctttgcaactggcggataaaatcaacaatttcgtcgattccaacgaaagaatattggaatccaaacaaggaaacttcttcctaaggggagcaaaccagggcaatttccgaggagataggcagaactaccgcggaaataaccaaaactgggataggcaacgtcgagacagggatagaaaggaaaaagataattattaataaacatagatcttttg

SEQ ID NO: 509 - DNA, 503 bp, Diabrotica virgifera
  misc_feature (1)..(503): RNAi target sequence
ggggctctttagttgtcatctgtcatttaagtagtaatttcattccaaaatgaagatcggactttgtgcttacagcgggtacaaaatttaccccggacatggcaaaacaatggttaaagttgatggaaagaccttcattttcctcaactcaaaatgtgaaagggcgcacttgatgaaaaggaacccccgtaaagtaacatggactgtcttgtacagacgtaaacataagaagggtcaggaggaagaagccaccaaaaaacgtaccagaaggacacagaaattccaaagggctattgtaggtgcttctttaaatgatatcatggccaagagaaaccaaaggcctgaagtaaggaaggcccaaagggagcaagccattcgtgccgctaaggaacagaaaaagagcacaaagacagccaggaaggctacagcccccgccaaggccaaacctgctcctaaacagaaagtaaccaagaatcaacccaaagctgcacctagagtaggag

SEQ ID NO: 510 - DNA, 19 bp, Artificial Sequence
  primer
  misc_feature (1)..(19): forward primer
gctctttagttgtcatctg

SEQ ID NO: 511 - DNA, 23 bp, Artificial Sequence
  primer
  misc_feature (1)..(23): reverse primer
ctcctactctaggtgcagctttg

SEQ ID NO: 512 - DNA, 2131 bp, Diabrotica virgifera
  misc_feature (1)..(2131): WCRW transcript ta01391.001_diavv
aaagatggaaggaaatgaggccaatacttagcccatcgttcacaagcagcaaaatgaaatcgatgtttatgctgatgtcagaatgtggcgaaaagttggtcaaattttttatggaaaaagaccagaatgctatagaaattgaaatgaaagacacattaacgcgttatactaatgatgttattgcctctgcagctttttggagtacagattgattctttaaacaacactgaaaatgaattctatctcatgggaaaaaatgcaaccaatttccgtggtttctggaggactatgaagttgtttggatatatgattataccaaaaatatttgagttctttaaagtgacattgtttgatatgaacgttcgacgattttttactgaattgattagtggaacaataaagatcagggaagagaaaggcattattcgtcccgatatgattcacctactcatgcaagcaagaaaaggaatccatcaaaaagaagaaaaggttgttgatgctggatttgctgtagtacaagaatcgaatttagaatcaaaagtagttgcgacagaaatgaccgacttagacatctgcgctcaagcattgattttcttctttgctggatttgagacggtctcgtcaaccatgtgctttgtggctcatgaattggcctgtaatcctgatgtccaatcgagattaagagatgaaatacgtgaaacactcgatcaatgtaatggaaaagtaacctacgaagctatgttgaaaatgaaatatctggatatggtaatatcagaatccatgaggaaatggccagcagttatagctgttgatcgaatttgcaccaaaccatacacactcgaaccagcaacactcgatgagaagcccctccacttagacaaaggcaccataatctggttccccatttacggtctccaccgcgatcctaaacactacccagacccagaacggtttgatcctgaaagattcagcgatgaaaacaaaggaaacatcaatccatacgcttaccttccatttggagtcggccctagaaactgcatcggttccagatttgctttattagagatgaaagtattgtttttccatttgttagccaattttgagattgtgccaggtccaaagacggaaattcctttgcggatttgtaagaaacaattcggtttgactgcagaaaatggtttttggttcaacttgaagaaactgaagaattagtctttgatatgtttgataaaagtcttgataaaatattgtttaaccatatctacttatttggtgtaatgtattttctagtcataattcttttaaactttttcttaacgtttcagcgggcgcaccctataatttcacatgagaagacgcgtgtcgtagattatacgtctttgcgtaaataatgtcttcttcaaataaatgtttggaaattgttacaatgatattttcttcttcttcctgcttccttataggctcgcatctgttctatcttcggatgcctcttcatcagatatccgcagcacgtccacacaggtaaacctaaacataaaaacgggggctctttagttgtcatctgtcatttaagtagtaatttcattccaaaatgaagatcggactttgtgcttacagcgggtacaaaatttaccccggacatggcaaaacaatggttaaagttgatggaaagaccttcactttcctcaactcaaaatgtgaaagggcgcacttgatgaaaaggaacccccgtaaagtaacatggactgtcttgtacagacgtaaacataagaagggtcaggaggaagaagccaccaaaaaacgtaccagaaggacacagaaattccaaagggctattgtaggtgcttctttaaatgatatcatggccaagagaaaccaaaggcctgaagtaaggaaggcccaaagggagcaagccattcgtgccgctaaggaacagaaaaagagcacaaagacagccaagaaggctacagcccccgccaaggccaaacctgctcctaaacagaaagtaaccaagaatcaacccaaagctgcacctagagtaggaggaaaacgttaatattgtataaacgttatttaataaaataagtttttttccataaaaaaaaaaaaaaaatgcgaaaaaaaaacatgt

SEQ ID NO: 513 - DNA, 502 bp, Diabrotica virgifera
  misc_feature (1)..(502): RNAi target sequence
aaagtttttgagccgtcaacatgggtaagccccgtggattgagaaccgctaggaaacatgtgaatcaccgtcgtgaacaaagatgggctgataaagattacaaaaaggcacatttaggaactagatggaaggctaatccttttggaggtgcttctcatgctaaaggaattgtattggaaaaagtgggagttgaagcaaaacaacctaactctgctattcgcaagtgcgttagggtacagttaattaaaaatggtaaaaaaatcacagccctcgtacctagagatggttgcttaaaccatatagaagaaaacgatgaagttctagttgcaggttttggacgtaaaggtcatgctgtaggagatattcccggagttagatttaaggttgttaaggtcgctaatgtgtccctattagctttatacaaagaaaagaaggaaaggccaagatcataattaaaatgttattttttttatttatttgcttggcacttttaatttttaaa

SEQ ID NO: 514 - DNA, 22 bp, Artificial Sequence
  primer
  misc_feature (1)..(22): forward primer
aaagtttttgagccgtcaacat

SEQ ID NO: 515 - DNA, 24 bp, Artificial Sequence
  primer
  misc_feature (1)..(24): reverse primer
tttaaaaattaaaagtgccaagca

SEQ ID NO: 516 - DNA, 616 bp, Diabrotica virgifera
  misc_feature (1)..(616): WCRW transcript ta00545.001_diavv
ggggattttcggttggggggttgggagcagttatgggggctttccggtcaaagtttttgagccgtcaacatgggtaagccccgtggattgagaaccgctaggaaacatgtgaatcaccgtcgtgaacaaagatgggctgataaagattacaaaaaggcacatttaggaactagatggaaggctaatccttttggaggtgcttctcatgctaaaggaattgtattggaaaaagtgggagttgaagcaaaacaacctaactctgctattcgcaagtgcgttagggtacagttaattaaaaatggtaaaaaaatcacagccttcgtacctagagatggttgcttaaaccatatagaagaaaacgatgaagttctagttgcaggttttggacgtaaaggtcatgctgtaggagatattcccggagttagatttaaggttgttaaggtcgctaatgtgtccctattagctttatacaaagaaaagaaggaaaggccaagatcataattaaaatgttattttttttatttatttgcttggcacttttaatttttaaataaagtgttaagcatataattttgtacagtgttttatttcaataaacaattttatacctgaaata

SEQ ID NO: 517 - DNA, 719 bp, Diabrotica virgifera
  misc_feature (1)..(719): RNAi target sequence
gggtgatccttcagttttcgtccacgcgtgtcaaaatggcgaaaaagaaaccagaggataaaaataatcaaagcgatgatgatacaaaaaacgagagtgattactcgtcgaacgaagaagaaccaaacttcagtgatcctgaagactacgaagacgatgtctctgatgaagaactcttaggtgatgttttaaaagaaaagcctaaggaaactgatggagtagaaagtgttatagtagtagatggagttcctcaagtaggtcctaatcgtattgaaaagttgaagtcagtcattgtcaaaatatttgtgaagtttggaacaatagtaaatgaattctaccctgtcaatagtgagggccacaccaaaggttatatctttatagaatattcctcaccatctgaagctgctgaggctgttaagctcactaacaattttaaattggataagcaccatacctttcaagttaacctctttactgatttttctaagtatgaccaaattcctaataagtgggaccctccagagccacaaccttaccaagggcaagcagacttgcattcttacttattggaaccggatgcatatgatcagtttgctgtagttgttgcacaaacacaagctgtgcaaatttggcagaatacacagcctgatcctagtctcattgaagctagaaacagctggagtcaaacgtacataaaatggtcacctctgggtacattc

SEQ ID NO: 518 - DNA, 19 bp, Artificial Sequence
  primer
  misc_feature (1)..(19): forward primer
gtgatccttcagttttcgt

SEQ ID NO: 519 - DNA, 22 bp, Artificial Sequence
  primer
  misc_feature (1)..(22): reverse primer
gaatgtacccagaggtgaccat

SEQ ID NO: 520 - DNA, 2397 bp, Diabrotica virgifera
  misc_feature (1)..(2397): WCRW transcript ta01172.001_diavv
gggggtgatccttcagttttcgtccacgcgtgtcaaaatggcgaaaaagaaaccagaggataaaaataatcaaagcgatgatgatacaaaaaacgagagtgattactcgtcgaacgaagaagaaccaaacttcagtgatcctgaagactacgaagacgatgtctctgatgaagaactcttaggtgatgttttaaaagaaaagcctaaggaaactgatggagtagaaagtgttatagtagtagatggagttcctcaagtaggtcctaatcgtattgaaaagttgaagtcagtcattgtcaaaatatttgtgaagtttggaacaatagtaaatgaattctaccctgtcaatagtgagggccacaccaaaggttatatctttatagaatattcctcaccatctgaagctgctgaggctgttaagctcactaacaattttaaattggataagcaccatacctttcaagttaacctctttactgatttttctaagtatgaccaaattcctaataagtgggaccctccagagccacaaccttaccaagggcaagcagacttgcattcttacttattggaaccggatgcatatgatcagtttgctgtagttgttgcacaaacacaagctgtgcaaatttggcagaatacacagcctgatcctagtctcattgaagctagaaacagctggagtcaaacgtacataaaatggtcacctctgggtacattcttatgtacttttcacaggttgggtgttgcattgtgggcaggacctggatttttgcaatacaaaaaatttacccattcaaatgttcaatttattgatttctcgccatgtgaaaagtatttagtgacttattccccacaaggagacccacataatccagaacagaaaaggatcatcatttgggatattaggacaggtcttgaaaagcgttcattcaatccagaaggtccaacagcatggccaatcttcaggtggtctcatgacgacaaatattttgctcgtattggtcaaaacaatgatgcccttcaagtatacgaaacaccatcttttggtcttctagataagaaatcaatcaaaattaacggcataagagatttcaattggtcgcccacagataatgttgtagcttattgggtagccgaagacaaagatgtgcctgccagtgtaactctgttagaattaccaaacaggaatgaaattagaaagaagaatttgtttaatgttgctgactgtaagatacactggcagaagtctggagattacctgtgtgtcaaggtagacaggtattcaaaggttcgcaaggagaagaatgaaaccaagtattcaggtatgtactgcaactttgaaatattccacatgaaggagaagcaaatacctgtagacagtgtagagtgcaaggaacccattcaggcgtttgcatgggagccggttggttctaaatttgcaatgatccatggcgaatcccccagcatcagtgccagtttctacgaggttaggataggacaggctcctatccttctcaagaaatttgagaaaagagcttgcaaccatctgttttggtctcctagtgggcagttcatagttttagcaggcttgggttccaacggaggtggatcgctggaatttgttgatactcacgaatttttaatcatgaacactacagaccatttccaattgtcagatgtagagtgggatccaactggaagatatgtaattactggagtctcattttggaagaccaaggttgatacaggttattggatttggtccttccaaggaaaaatcctcaagcgcatcaatttggaaaagttctcccagattctctggagacctagaccaccatcattactcagcgatgaaaagcaaaaggaggtcaagaagagcctaaagaaatactacccgcagttcgagagcaaagacaggatgcgacaatccaaggcttccaaggaacttatcgagaagagagctgctcttatggagaaattccaagcctacagagaggagaggatcgaggagtacttggaccaaaaatcaaggcgtttgcagcttagaaataacattgacactgatgaattaaatgcagagaacgttgaggaggaaatcgtagaattctttattaaagaagaagtaattccagtcgactagcaccatcttgaaagtccggtcctttccctgcgtgtgctttgttacaacacattcagggagatttaaagtgaaaacgttaaatattataatataaaaaatatttgtattttggacattgacataaatatttgttaatcaagtgtctcgttcaattaatagtgttttatatttttgacacgcgtaccatctttccaaaaactaatgaacattgttattaaacgccttgtggttactaaaataaaaaattcaataag

SEQ ID NO: 521 - DNA, 639 bp, Diabrotica virgifera
  misc_feature (1)..(639): RNAi target sequence
ccgtgatatgggttacaacgtatctatgatggctgactcgacatcacgttgggccgaagctttgagagaaatttcaggtcgtttggctgaaatgcctgccgattccggttatccggcttacttaggtgcccgtttggcttccttctacgaacgtgctggtcgcgttaaatgtttaggtaatccagacagagaaggatccgtttcaattgtaggagccgtatcacctcctggtggtgatttctcagatcctgttaccactgctactcttggtattgtacaggtgttctggggtttggacaagaaacttgcccaacgtaagcacttcccttcagtagactggcttggatcatattccaaatatttaagagcattggacgacttttatgacaaaaacttccaagagtttattcctcttagaaccaaagttaaggaaattcttcaggaagaagatgatctagccgaaattgtgcagctggtaggtaaagcatctctggcagaaacggacaaaatcaccttggaaattgccaggcttcttaaagaagatttcttgcaacaaaactcatactcttcttatgacagattctgtccattctataaaactgtcggtatgttgagaaacatgatcggtttgtacgacat

SEQ ID NO: 522 - DNA, 22 bp, Artificial Sequence
  primer
  misc_feature (1)..(22): forward primer
ccgtgatatgggttacaacgta

SEQ ID NO: 523 - DNA, 22 bp, Artificial Sequence
  primer
  misc_feature (1)..(22): reverse primer
atgtcgtacaaaccgatcatgt

SEQ ID NO: 524 - DNA, 2533 bp, Diabrotica virgifera
  misc_feature (1)..(2533): WCRW transcript ta01291.009_diavv
cggagatgaagagaagggtcagtcagctgacttatcttatgacaagttgttcagtttgggaaaactcgtccataatggggatagttgagtgggtgaggttccaagagaaacataacatccatccacaaatatgtcgaaagtaaggatcggagatgaagagaaggaagggcagtatggttatgtccatgctgtctcaggtccagtcgttactgctgagaaaatgtctggttctgctatgtacgaactggtacgtgtcggatactatgagctggtaggagaaatcattagattggaaggtgacatggctactattcaggtatacgaagaaacatcaggtgtaactgttggtgatccagtattaagaactggtaaaccactttcagtagaacttggacctggtattatgggttccatttttgatggtatccaacgtccattgaaagacatttgtgacgctactgatagtatttacatccccaagggtattaatgtaccttctttatcgagaacagcaaaatgggacttcaacccaatcaacatcaagttgggatctcacttaactggaggtgatatatatggtctagttcatgaaaacacccttgtcaaacacaaaatgattctgcctcctagagctaagggtactgtaacctacattgcagaaccaggaaactacactgttgatgaagtagtattggaaactgaatttgatggtgatcgtaccaaatatactatgttgcaagtatggcctgtacgtcaagcaaggccagtcagtgaaaaattacctgccaaccatcctctgcttacaggacagcgtgtacttgatgctcttttcccatgtgtacagggtggtactactgccattcccggagctttcggttgtggaaaaactgtaatttcacaatctctttccaaatattccaactctgatgtcattatctacgtcggttgcggagaaagaggtaacgaaatgtctgaagtattgagagatttccctgaattgactgttgaaattgacgggcacactgaatctattatgaaacgtaccgcattggtcgccaacacatctaacatgcctgtagctgctcgtgaagcttctatctatactggtattactctttctgaatacttccgtgatatgggttacaacgtatctatgatggctgactcgacatcacgttgggccgaagctttgagagaaatttcaggtcgtttggctgaaatgcctgccgattccggttatccggcttacttaggtgcccgtttggcttccttctacgaacgtgctggtcgcgttaaatgtttaggtaatccagacagagaaggatccgtttcaattgtaggagccgtatcacctcctggtggtgatttctcagatcctgttaccactgctactcttggtattgtacaggtgttctggggtttggacaagaaacttgcccaacgtaagcacttcccttcagtagactggcttggatcatattccaaatatttaagagcattggacgacttttatgacaaaaacttccaagagtttattcctcttagaaccaaagttaaggaaattcttcaggaagaagatgatctagccgaaattgtgcagctggtaggtaaagcatctctggcagaaacggacaaaatcaccttggaaattgccaggcttcttaaagaagatttcttgcaacaaaactcatactcttcttatgacagattctgtccattctataaaactgtcggtatgttgagaaacatgatcggtttgtacgacatggcgagacacgctgtagaatcaaccgcacaatcagaaaataagatcacttggaacgtaataagagattcaatgagtggaattttatatcaacttagcagtatgaaatttaaggatcccgtaaaagatggtgaagctaaaatcaaggcagattttgatcaattatatgaagatattcagcaggccttcagaaacttagaagattaaatctttttaaggaaattttcctattttgttcatcagtgtaagtttaaaaatatagcgatatttatcaaaaagaataataaggcctctatccctcacttctgtgaatattaatatggccgtactaatgatagtaactaaagataggttttctcttttttgatattatcctgtacaaaataaattatgtaaattgttgaatatgtgtatagtttttttgggtgagggtacagtgcttattaaatactttttaaacatttttcccgccattccaattactattaagttttttcgttttaatacttttttaaatatacaggtgcttaatatcgtttatattttcagtattacttggttttcttcatgtaaattgttttaaatttttcttttacccttttaatcttgtatattacattacccaattaaagttaattgtacagattaagataaacgagtatcttataacatctattagattgttagaatcaataaatgtagtgtaattgttctgttttgaacaaataaatgcatcattattgttgttaaaaaaaaaaaaaaaaaaaa

SEQ ID NO: 525 - DNA, 507 bp, Diabrotica virgifera
  misc_feature (1)..(507): RNAi target sequence
ggggtccttttactgtgtttcttaggatttggaaggtacaaaatgaccaactctaaaggttaccgccgaggaaccagggatctatttgcccgcaagtttaaaaaacgtggtgtaattccactttccacatatttgagagtctacaaagttggagatattgtagatatcaagggtaatggtgcagttcaaaagggtatgccccacaaagtgtaccatggtaagaccggacgtgttttcaatgttactgcacatgcattaggtgtaattgtaaacaaaagggttcgaggaagaatcatccccaaaagaatcaatctccgtattgaacatgtaaaccactccaagtgtcgtcaagacttcttgcaaagagtaaaatccaatgaaaagctacgtaaagaagctaaagaaaagaacattaaagtagaacttaggagacaacctgcccaacctaggccagcacatattgttagcggaaaggttccagcacaggtgcttgctcctatcccatat

SEQ ID NO: 526 - DNA, 20 bp, Artificial Sequence
  primer
  misc_feature (1)..(20): forward primer
gtccttttactgtgtttctt

SEQ ID NO: 527 - DNA, 21 bp, Artificial Sequence
  primer
  misc_feature (1)..(21): reverse primer
atatgggataggagcaagcac

SEQ ID NO: 528 - DNA, 696 bp, Diabrotica virgifera
  misc_feature (1)..(696): WCRW transcript ta01222.003_diavv
cgataactgagtttccttcaatgataagttcatccttttgtttggtggagtttactactggaacacctggggggagagggggacagcgacatttcctccgccgggtccttttactgtgtttcttaggatttggaaggtacaaaatgaccaactctaaaggttaccgccgaggaaccagggatctatttgcccgcaagtttaaaaaacgtggtgtaattccactttccacatatttgagagtctacaaagttggagatattgtagatatcaagggtaatggtgcagttcaaaagggtatgccccacaaagtgtaccatggtaagacaggacgtgttttcaatgttactgcacatgcattaggtgtaattgtaaacaaaagggttcgaggaagaatcatccccaaaagaatcaatctccgtattgaacatgtaaaccactccaagtgtcgtcaagacttcttgcaaagagtaaaatccaacgaaaagctacgtaaagaagctaaagaaaagaacgttaaagtagaacttaggagacaacctgcccaacctaggccagcacatattgttagcggaaaggttccagcacaggtgcttgctcctatcccatatgaattcattgcttaggtttgtttatcttaaaataaaatcctttatataataaaaaaaaaaagaaaaaatcggcagatcccttaaaaaa

SEQ ID NO: 529 - DNA, 519 bp, Diabrotica virgifera
  misc_feature (1)..(519): RNAi target sequence
ggtcagtgaagccatcttggcaaacgttagtaacgtgaaataaaacttaaattttttcaaaatgggtcgtatgcacgcaccaggaaaaggtattgcccagtcggcattgccatacagaaggagtgtaccaacatggttgaaagtcacaccagaagaagtaaaagaccatatttttaaacttggcaagaaaggcttgactccatcacaaattggtgttatcctcagggattcatatggtgttgcccaagtaaggtttgtttctggaaacaaaatcttgcgtatcatgaaagctatgggtcttgcccctgatctaccagaagatttgtactaccttatcaagaaggcagtagctatccgcaaacatttagaacgtaacagaaaagacaaggacagcaaattccgtttgattttggtagaatcacgtatccaccgtttggctaggtactacaaaaccaagagcgtattggcacccaactggaagtacgaatcaagcacagcatctgctttggtcgcttaaat

SEQ ID NO: 530 - DNA, 19 bp, Artificial Sequence
  primer
  misc_feature (1)..(19): forward primer
gtcagtgaagccatcttgg

SEQ ID NO: 531 - DNA, 22 bp, Artificial Sequence
  primer
  misc_feature (1)..(22): reverse primer
atttaagcgaccaaagcagatg

SEQ ID NO: 532 - DNA, 596 bp, Diabrotica virgifera
  misc_feature (1)..(596): WCRW transcript ta05572.002_diavv
ggggctgggctcagtgaagccatcttggcaaacgttagtaacgtgaaataaaacttaaattttttcaaaatgggtcgtatgcacgcaccaggaaaaggtattgcccagtcggcattgccatacagaaggagtgtaccaacatggttgaaagtcacaccagaagaagtaaaagaccatatttttaaacttggcaagaaaggcttgactccatcacaaattggtgttatcctcagggattcatatggtgttgcccaagtaaggtttgtttctggaaacaaaatcttgcgtatcatgaaagctatgggtcttgcccctgatctaccagaagatttgtactaccttatcaagaaggcagtagctatccgcaaacatttagaacgtaacagaaaagacaaggacagcaaattccgtttgattttggtagaatcacgtatccaccgtttggctaggtactacaaaaccaagagcgtattggcacccaactggaagtacgaatcaagcacagcatctgctttggtcgcttaaattgtgcttttatgttaagtttataaaataaaaatttctactaaaaaaaaaaaaaaaaaatcggaaaaaaa

SEQ ID NO: 533 - DNA, 600 bp, Diabrotica virgifera
  misc_feature (1)..(600): RNAi target sequence
ggacagcttttcactgtcattcgtcattctgatacatttttttgggtactttgggttgtacttgggataaaagacctttttgtatttccaaatacattgtcatataaattaaaaaagaaatggctgccatcagatctatgtctcgccttcttattaatagatcacttcaaaccactgcaaagaggacctatgccgaccaaatgaacttcacatttgcagctggaaatcaggtttactatactgcaacttcagttaaacaagtagatgtgccatctttctctggtagctttggtatcctccccgcccatgtacccacactggctgtgctaaaacctggagtagtcactgtttacgaagatggtggtaatgttaagaaaatctttgtttccagtggtactgtcaccatcaatgatgattcatcagttcagattcttgctgaagaagcccacccagtagaaaacattgatgtcaatgcagcaagagacatccttaccaaagcccagagccagttatcatctgcaagtacagatgaggcgaaagctgaagcctccattgccgttgaagtgggagaagcgttagtcaaagcggctgaataataat

SEQ ID NO: 534 - DNA, 22 bp, Artificial Sequence
  primer
  misc_feature (1)..(22): forward primer
ggacagcttttcactgtcattc

SEQ ID NO: 535 - DNA, 22 bp, Artificial Sequence
  primer
  misc_feature (1)..(22): reverse primer
attattattcagccgctttgac

SEQ ID NO: 536 - DNA, 797 bp, Diabrotica virgifera
  misc_feature (1)..(797): WCRW transcript ta03508.001_diavv
ggtaggggagtgacagacagtcaggtggacagcttttcacggggattcgtcattctgatacattttttttgggtactttgggttgtacttgggataaaagacctttttgtatttccaaatacattgtcatataaattaaaaaagaaatggctgccatcagatctatgtctcgccttcttattaatagatcacttcaaaccactgcaaagaggacctatgccgaccaaatgaacttcacatttgcagctggaaatcaggtttactatactgcaacttcagttaaacaagtagatgtgccatctttctctggtagctttggtatcctccccgcccatgtacccacactggctgtgctaaaacctggagtagtcactgtttacgaagatggtggtaatgttaagaaaatctttgtttccagtggtactgtcaccatcaatgatgattcatcagttcagattcttgctgaagaagcccacccagtagaaaacattgatgtcaatgcagcaagagacatccttaccaaagcccagagccagttatcatctgcaagtacagatgaggcgaaagctgaagcctccattgccgttgaagtgggagaagcgttagtcaaagcggctgaataataatttaatttttgtaattttatgtaaatttaataaattagtgtctcaatggtactgttcattttaaaacaacaacatattagatctatacctctatgagttacaatttttacaaaaacgagaatcaatccaaatacataatttttgtttaccgttaaaaaaaaaaaaaaaaaa

SEQ ID NO: 537 - DNA, 612 bp, Diabrotica virgifera
  misc_feature (1)..(612): RNAi target sequence
gggggtttgtaaatctagtcattacagaaacagtaataataaattaccttgttctgattattttgtagaaattgtaaaatggaaaagtggtgtttttgtttgtttcttctttttatatggtttgtttccgcacgtggtgccaacaactcggagtatcctgacctacggccagaatggtcctattgttatgagttcacttggtttgggccagattataataacgtgtccacgtacaataatacgtgtgccgattatctggacgaaacaagagccgaaggtataccctgcgctgctcccatcgtaatatcgtatgatggaacgttaccggatatgcagtatctctgggacaaccacaaagaaagcgtactctgcaaacgcagcataaaccagatgtgtgtcaagtacacttacctctttaaccagaaaattgaaaatattacctacatgtgttctaaagttcagcatgaaggtgggggaaatattgacagtggatgctataaacagaaattggaaagaggatatgaaacagaagtgtgtgtatgtcaatcctccaatggaatttatcctccctgcaacagaagtgcctccatatttggttcgatcaatgttttc

SEQ ID NO: 538 - DNA, 19 bp, Artificial Sequence
  primer
  misc_feature (1)..(19): forward primer
gtttgtaaatctagtcatt

SEQ ID NO: 539 - DNA, 22 bp, Artificial Sequence
  primer
  misc_feature (1)..(22): reverse primer
gaaaacattgatcgaaccaaat

SEQ ID NO: 540 - DNA, 893 bp, Diabrotica virgifera
  misc_feature (1)..(893): WCRW transcript ta03675.001_diavv
ggtttgtaaatctagtcattacagaaacagtaataataaattaccttgttctgattattttgtagaaattgtaaaatggaaaagtggtgtttttgtttgtttcttctttttatatggtttgtttccgcacgtggtgccaacaactcggagtatcctgacctacggccagaatggtcctattgttatgagttcacttggtttgggccagattataataacgtgtccacgtacaataatacgtgtgccgattatctggacgaaacaagagccgaaggtataccctgcgctgctcccatcgtaatatcgtatgatggaacgttaccggatatgcagtatctctgggacaaccacaaagaaagcgtactctgcaaacgcagcataaaccagatgtgtgtcaagtacacttacctctttaaccagaaaattgaaaatattacctacatgtgttctaaagttcagcatgaaggtgggggaaatattgacagtggatgctataaacagaaattggaaagaggatatgaaacagaagtgtgtgtatgtcaatcctccaatggaatttatcctccctgcaacagaagtgtctccatatttggttcgatcaatgttttcctagtatttggaatactatggttatttgtttataaattattttgactaaaattgttgttattcatatctctgtataaaactttaaaaatctcaatacttactaaatttcaataaggataataaattattttaaatatgcagtattctattattttactgactattgcaaatgccactatcatattttgcaacttacacgacctatttgaaataccaccttctatacctttttgtcttttagaaattgtcggtcagatagtcaagagaggcagatgtcattaata

SEQ ID NO: 541 - DNA, 558 bp, Diabrotica virgifera
  misc_feature (1)..(558): RNAi target sequence
cgggggagtgattatctttgtaaaatggcacctacgaagccaaaagcagcggataaatccgcccccaagaaggaagaaaagaagaagcctgcggccgcaccagcagccggagccgctggagcttcttcctcaagttcaaaaacacccgccccagctccaaaagcagcagccaaagctgcaagcaaaccagctgacaagaaagcatcttcctcaaaaacccctgcacccgcacctaaagctgcctcagccaaaagctccgcgaaagcgcaagctgctgcccccaaaccaaaagccgctgctgctaaagctggaaaggctgcaggcaaaggtgctgccaaacccgcagccaaggctgcaggaaagaaaccagctgctgctggaaaggccaaggctcccgcaactcttattgctaagcccaagaagaatgttcctgttaaacaacaacagaaaggtgttggcaaaaagccagctgccagtgcagtgcaagtagcgagagcacttaaaatccaaaagaaagtaattaaaggccccaatggaacacactcaaggaaaatccgt

SEQ ID NO: 542 - DNA, 22 bp, Artificial Sequence
  primer
  misc_feature (1)..(22): forward primer
cgggggagtgattatctttgta

SEQ ID NO: 543 - DNA, 22 bp, Artificial Sequence
  primer
  misc_feature (1)..(22): reverse primer
acggattttccttgagtgtgtt

SEQ ID NO: 544 - DNA, 1017 bp, Diabrotica virgifera
  misc_feature (1)..(1017): WCRW transcript ta00525.004_diavv
gacgcttaggggaggggccttttagtgattatctttgtaaaatggcacctacgaagccaaaagcagcggataaatccgcccccaagaaggaagaaaagaagaagcctgcggccgcaccagcagccggagccgctggagcttcttcctcaagttcaaaaacacccgccccagctccaaaagcagcagccaaagctgcaagcaaaccagctgacaagaaagcatcttcctcaaaaacccctgcacccgcacctaaagctgcctcagccaaaagctccgcgaaagcgcaagctgctgcccccaaaccaaaagccgctgctgctaaagctggaaaggctgcaggcaaaggtgctgccaaacccgcagccaaggctgcaggaaagaaaccagctgctgctggaaaggccaaggctcccgcaactcttattgctaagcccaagaagaatgttcctgttaaacaacaacagaaaggtgttggcaaaaagccagctgccagtgcagtgcaagtagcgagagcacttaaaatccaaaagaaagtaattaaaggccccaatggaacacactcaaggaaaatccgtaactcagtccacttccgtcgtcctaagaccctcagaccacccaggagtcccaaataccccaagaggagtgttccccacagatcccgcatggatgcttacaatatcatcaaattcccattgaccaccgaagcagccatgaagaagattgaagataacaacacgttggtatttttagtacacactagggcaaacaagcaccacattaaagctgcagttaagaaattgtatgatatcaatgtagccaaggtcaacaccttaattaggcccgatggcaaaaagaaggcatatgtaaggttagctagagattatgatgctctagatgttgccaacaagattggcatcatataaattaatatcttaccttgttttattttttttgacatctaataaataagttgagaataaagttttttagtttgagttaaaaaaaaaaaaaatgcga

SEQ ID NO: 545 - DNA, 544 bp, Diabrotica virgifera
  misc_feature (1)..(544): RNAi target sequence
atgcgtgttgaggtcttttcttttcccaaaacttgacaaaaatgggtatcgacatcaaccataaatacgaccgtaaggttaggagaacagaacctagaagtcaagatgtatatttacgtcttttagtaaaactgtaccgttatttagcccgtcgtacaggggccaaattcaataaaataatcctgaaaagattgtttatgagcaaaatcaacagaccaccactatctttatccaagttagtgcgtttgatgaagaagcctggccgtgatggacttattgctgtcgtagtaggaacaattactgatgatgctaggatttttgaaattcccaaattgtctgtatgtgcccttcgcgtgacacaaactgctagggccaggatcttgaaagctggaggtgaagtcatcaccttcgaccaattggcactcagggccccaactggcaataaaactgtattgctacaaggcagacgtaatgcccgtgaagctgtgaaacactttggtcctgctcctggtgtaccacacagtcatgctaagccattggtaca

SEQ ID NO: 546 - DNA, 22 bp, Artificial Sequence
  primer
  misc_feature (1)..(22): forward primer
atgcgtgttgaggtcttttctt

SEQ ID NO: 547 - DNA, 22 bp, Artificial Sequence
  primer
  misc_feature (1)..(22): reverse primer
tgtaccaatggcttagcatgac

SEQ ID NO: 548 - DNA, 793 bp, Diabrotica virgifera
  misc_feature (1)..(793): WCRW transcript ta05162.001_diavv
ggctgtcgggggctggggggctaaccaaaattatacacatgcgtgttgaggtcttttcttttcccaaaacttgacaaaaatgggtatcgacatcaaccataaatacgaccgtaaggttaggagaacagaacctagaagtcaagatgtatatttacgtcttttagtaaaactgtaccgttatttagcccgtcgtacaggggccaaattcaataaaataatcctgaaaagattgtttatgagcaaaatcaacagaccaccactatctttatccaagttagtgcgtttgatgaagaagcctggccgtgatggacttattgctgtcgtagtaggaacaattactgatgatgctaggatttttgaaattcccaaattgtctgtatgtgcccttcgcgtgacacaaactgctagggccaggatcttgaaagctggaggtgaagtcatcaccttcgaccaattggcactcagggccccaactggcaataaaactgtattgctacaaggcagacgtaatgcccgtgaagctgtgaaacactttggtcctgctcctggtgtaccacacagtcatgctaagccattggtacattccaagggacgcaaatttgagagagcacgaggtcgtaggcgctcatgtggttacaagaaatagacttaagttaatcattttgtttctgctgtattcatatttgttgttcaataaataggaattgcagtacattggaattttgttttgtattttatagaatataacaaaataaaggaatttaatataaaaaaaaaaaaaaaaaaaaaaaaa

SEQ ID NO: 549 - DNA, 401 bp, Diabrotica virgifera
  misc_feature (1)..(401): RNAi target sequence
aaagaaaccgaaggcagagaaaaaggcaccaaaggagggtgcaactccaagtgataaaccctccgttaaaagacgtcctttcaaaagacatggacgtttatatgctaaagccatcttcacaggttacaaaagaggtcttcgtaatcaacacgaaaatacagccctattatctgtagaaggaaccagatcaaaagatgagagttggttttacgtaggaaagaaatgcgtctatgtatacaaagcaaaaaacaggacatgtgttcccggtaggcccaaatctgtcaaatccaaagttagggctatttggggaaaagtcaccagaccacatggcacaaggggtgcagtgagagccaaattcaataggaatttaccagccaaggctatgggacatcgtattcgta

SEQ ID NO: 550 - DNA, 21 bp, Artificial Sequence
  primer
  misc_feature (1)..(21): forward primer
aaagaaaccgaaggcagagaa

SEQ ID NO: 551 - DNA, 22 bp, Artificial Sequence
  primer
  misc_feature (1)..(22): reverse primer
tacgaatacgatgtcccatagc

SEQ ID NO: 552 - DNA, 1008 bp, Diabrotica virgifera
  misc_feature (1)..(1008): WCRW transcript ta00344.005_diavv
ccgattttttttttttttttttgtgttggaaaacgtattttttatttcttatttatatttataaaaacaactatatcttagatgggtacagcataatacgaatacgatgtcccatagccttggctggtaaattcctattgaatttggctctcactgcaccccttgtgccatgtggtctggtgacttttccccaaatagccctaactttggatttgacagatttgggcctaccgggaacacatgtcctgttttttgctttgtatacatagacgcatttctttcctacgtaaaaccaactctcatcttttgatctggttccttctacagataatagggctgtattttcgtgttgattacgaagacctcttttgtaacctgtgaagatggctttagcatataaacgtccatgtcttttgaaaggacgtcttttaacggagggtttatcacttggagttgcaccctcctttggtgcctttttctctgccttcggtttctttgccgctgcgtctgccattccgaagatctcgtttagaattaaaaagaagttatttcatttttctcctccaagtgataaaccctccgttaaaagacgtcctttcaaaagacatggacgtttatatgctaaagccatcttcacaggttacaaaagaggtcttcgtaatcaacacgaaaatacagccctattatctgtagaaggaaccagatcaaaagatgagagttggttttacgtaggaaagaaatgcgtctatgtatacaaagcaaaaaacaggacatgtgttcccggtaggcccaaatctgtcaaatccaaagttagggctatttggggaaaagtcaccagaccacatggcacaaggggtgcagtgagagccaaattcaataggaatttaccagccaaggctatgggacatcgtattcgtattatgctgtacccatctaagatatagttgtttttataaatataaataagaaataaaaaatacgttttccaacaaaaaaaaaaaaaaaaaa

SEQ ID NO: 553 - DNA, 542 bp, Diabrotica virgifera
  misc_feature (1)..(542): RNAi target sequence
aatctgtaaacatcggcgtagaatcgccattaatatataagtattttatatagaattaattcaaaatgccacccaagttcgatcccaccgaaattaaatatgtttacatgagatgtgtcggaggagaagttggagctacctcttctttggctcctaaaattggtccactaggtttgtctcccaaaaaagttggtgacgatattgccaaaggcactgctgactggaaaggtcttaaaatcacagttcagttgaaaatccaaaatcgtcaagctaccatttctgtagtcccatctgcctcctccctgatcattagggctcttaaagaaccaccacgcgataggaagaagcaaaagaacattaaacacactggtaacattactttcgatgaaatcatcgctattgccagacagatgaggcccaggtcaatggccaaacagttatccggaactgtaaaagaggttttaggaacagcccaatcagttggatgtacaattgatggtaaagcagcacatgatgttattgacgaggttaatgaaggaacc

SEQ ID NO: 554 - DNA, 23 bp, Artificial Sequence
  primer
  misc_feature (1)..(23): forward primer
aatctgtaaacatcggcgtagaa

SEQ ID NO: 555 - DNA, 21 bp, Artificial Sequence
  primer
  misc_feature (1)..(21): reverse primer
gttccttcattaacctcgtca

SEQ ID NO: 556 - DNA, 768 bp, Diabrotica virgifera
  misc_feature (1)..(768): WCRW transcript ta01789.001_diavv
ggaagatgattgaccatgtcaattgtcacgtcatgtgtcaggggtccttttcgaatttaccattgtgaaaatattttcactattgtaaaaatctgtaaacatcggcgtagaatcgccattaatatataagtattttatatagaattaattcaaaatgccacccaagttcgatcccaccgaaattaaatatgtttacatgagatgtgtcggaggagaagttggagctacctcttctttggctcctaaaattggtcctctaggtttgtctcccaaaaaagttggtgacgatattgccaaaggtactgctgattggaaaggtcttaaaatcacagttcaattgaaaatccaaaatcgtcaagctaccatttctgtagtcccatctgcttcctccctgatcattagggctcttaaagaaccaccacgcgataggaagaagcaaaagaacattaaacacactggtaacattactttcgatgaaatcatcgctattgccagacagatgaggcccaggtcgatggccaaacagttatccggaactgtaaaagaggttttaggaacagcccaatcagttggatgtacaattgatggtaaagcagcacatgatgttattgacgaggttaatgaaggaaccatagaagtaccagatgaataaactattattagaatattttttctaagttatcagttgttttatttaacctttatccaaatgtggcattttttaatttgttaagaatgtaattgatggattcgaccgttacttgatgg

SEQ ID NO: 557 - DNA, 450 bp, Diabrotica virgifera
  misc_feature (1)..(450): RNAi target sequence
  misc_feature (341)..(341): n can be any nucleotide
  misc_feature (413)..(413): n can be any nucleotide
  misc_feature (426)..(426): n can be any nucleotide
aggcatttcaaaaacaaccaaccgtttttctcaaccgcaaaagtggaggaaagaaaaatttaagacattctcgcagtgtagggctcggttttaaaactcccagagaggcaattgaaggttcttgcattgacaagaaatgtcccttcactggaaatgtatcaatccgtggccgtattctcactggagttgtccaaaaaatgaagatgcaaaggactattgtcatccgtagagattatttgcattatatcaggaaatacaatcgttttgaaaagaggcataggaatatgtctgtacatttatcaccctgcttcagggatgtggaaattggagatgtagttacnattggtgaatgcagaccactttcaaaaacagttagattcaacgtattgaaagtaactaaaggtagcagttcnaagaagagcttcnggaagttttgagtgatgaaacatt

SEQ ID NO: 558 - DNA, 22 bp, Artificial Sequence
  primer
  misc_feature (1)..(22): forward primer
aggcatttcaaaaacaaccaac

SEQ ID NO: 559 - DNA, 24 bp, Artificial Sequence
  primer
  misc_feature (1)..(24): reverse primer
aatgtttcatcactcaaaacttcc

SEQ ID NO: 560 - DNA, 615 bp, Diabrotica virgifera
  misc_feature (1)..(615): WCRW transcript ta02086.002_diavv
cttgtcaatgtaagaaccttcaattgcctctctgggagttttaaaaccgagccctacactgcgagaaggtcataaaggggaatcctttcttttactagtgaaaatggcggatcagaccgaaaaggcatttcaaaaacaaccaaccgtttttctcaaccgcaaaagtggaggaaagaaaaatttaagacattctcgcagtgtagggctcggttttaaaactcccagagaggcaattgaaggttcttacattgacaagaaatgtcccttcactggaaatgtatcaatccgtggccgtattctcactggagttgtccaaaaaatgaagatgcaaaggactattgtcatccgtagagattatttgcattatatcaggaaatacaatcgttttgaaaagaggcataggaatatgtctgtacatttatcaccctgcttcagggatgtggaaattggagatgtagttacaattggtgaatgcagaccactttcaaaaacagttagattcaacgtattgaaagtaactaaaggtagcagttcaaagaagagcttcaggaagttttgagtgatgaaacatttttaaaataaaaatcttataaaatgaaaaaaaaaaaaaaaaaa

SEQ ID NO: 561 - DNA, 225 bp, Diabrotica virgifera
  misc_feature (1)..(225): RNAi target sequence DV-HP2-FRAG1
gaaacgacaaggaggaaagttgtgtcttgcggagtactagaaacaccgagattcggacgaaagagtactttcctgttcgtgcccggtacgaaggttacctatgaatgcatccaagagttcgtgttggtaggtgatcagcggagagagtgtcaagcggatggaacatggaatattcctgaatacggatacacatattgcttacgtcagcaggaatactctcaacga

SEQ ID NO: 562 - DNA, 212 bp, Diabrotica virgifera
  misc_feature (1)..(212): RNAi target sequence DV-HP2-FRAG2
gagcattgttccacagggaattcggaaggacttcagcgacttacaacaacaaaacgttcaagcctcaattcctaatgaatccggaagatttcctaccaaccaacagatctacagatcttaagcgaatatccgaaatatgtcctctaaagttgtacgaatgttactacgattacgctatgacggttgacagggatttggcgcattacaccaag

SEQ ID NO: 563 - DNA, 210 bp, Diabrotica virgifera
  misc_feature (1)..(210): RNAi target sequence DV-HP2-FRAG3
cttgggagaagcagaatttgaccacaaacgacaacgctaacatccgaatttctctctggggttacagagaaacgactatgaaaccagtgtttgtttatatcaccgatatcgctgataatgttcaaaacattggagaacacacgattgttccttctcagtttagaactagagtcaatcaatatctgactgatattaagtttggattcctcc

SEQ ID NO: 564 - DNA, 229 bp, Diabrotica virgifera
  misc_feature (1)..(229): RNAi target sequence DV-HP2-FRAG4
aatggaaagggagaattcgcattggtgaaatcagttacgcaaacggacaatctggaaatccaaggaagatttgagcaaatggaccctaacacttatggtgaggttagagctactcagctgacttctgtagtagctaaaggtaataacacaatagcaattgaagtcagaaggagacctctggattctagatggagatataggttggatgttatagcagataatagaagac

SEQ ID NO: 565 - DNA, 170 bp, Diabrotica virgifera
  misc_feature (1)..(170): RNAi target sequence DV-HP2-FRAG5
gaaacgacaaggaggaaagttgtgtcttgcggagtactagaaacaccgagattcggacgaaagagtactttcctgttcgtgcccggtacgaaggttacctatgaatgcatccaagagttcgtgttggtaggtgatcagcggagagagtgtcaagcggatggaacatggaa

SEQ ID NO: 566 - DNA, 233 bp, Diabrotica virgifera
  misc_feature (1)..(233): RNAi target sequence DV-HP2-FRAG6
gaaacgacaaggaggaaagttgtgtcttgcggagtactagaaacaccgagattcggacgaaagagtactttcctgttcgtgcccggtacgaaggttacctatgaatgcatccaagagttcgtgttggtaggtgatcagcggagagagtgtcaagcggatggaacatggaatattcctgaatacggatacacatattgcttacgtcagcaggaatactctcaacgacaagctgg

SEQ ID NO: 567 - DNA, 162 bp, Diabrotica virgifera
  misc_feature (1)..(162): RNAi target sequence DV-HP2-FRAG7
tttgttatttttgttttgtttagtgttagcgttaaaggactagatggtgatcttccaccagatgtcgaaactatcgatgtggagactacgaatgtaagtaacgcggatccagacgcagggaaacctattccggtggaagatacgcctaatggagtccctcca

SEQ ID NO: 568 - DNA, 473 bp, Diabrotica virgifera
  misc_feature (1)..(473): RNAi target sequence DV-HP2-FRAG8
gtgaatacaaactatgaagtagataaatccttagttaatgtaaccaatagtttggtaaatgtgactaaaaatcccagacggacttatcagacagttaataaaatgggcaaatattcgacattttatgctgcagattacgatcctatgacctcagacacagctccaccagacactgaccaacgaggaggaggaggaactccatacactatatcagaaccgagactggcagaaataaggaaacattttatgtacccatttttcgataaaggaggcagtgataataacttgggagatttccaaaaggacattcaatcttccattcctcaggtgcacaagaatttaaacttccagttgcctttctttggattcaggtataattacacaagagtttcagtgaatgggtatctggaattcagcgatccacctccaaattatgactatccattagtatttccaattaaagaatggcccaa

SEQ ID NO: 569 - DNA, 430 bp, Diabrotica virgifera
  misc_feature (1)..(430): RNAi target sequence DV-HP2-FRAG9
aaagaatgatcctgcctttattggcattttcttcagcagatgcagaatcggtaatctacgtgatggagacattgatcaaagaacacccggggtctattttagaatggaaagagatttaagaacgaggcaagacagaatgggtgtagaaattagagaaagacttaagtgggatatcagaacaggagtcattggatcagaaacattcgatcctaagcacgccgttattgtcacttggaaaaatgttactttcactggaggattcgctaatgctaaatacaagacaaacaccttccaaatggttcttgcaactgacgaagtcttcacttacgcgatgttcaactacctcaacttggactggacctcccacactgaagcgggtggtgattcccaaaacggggaaggtggtgtcagtgcctatgttggttttaac

SEQ ID NO: 570 - DNA, 486 bp, Diabrotica virgifera
  misc_feature (1)..(486): RNAi target sequence DV-HP2-FRAG10
ccagaagctacgaatacaatccttacagtcaagcttccgtcattcgagatctcacatcagttggatttggaaatggttttaagggaagacatattttccgtatagacgaagacattttgcttggatcgtgcaacaaagatatagatggtgccaaccttcccctgaaattcgctcctgaaagtggtaacatgttgggtggaacagtggtaaatataactggtccatgcttcaatttgaatgataggattcgatgcaagtttgacgtatcaaatgaagtatttgggtatgttgttgataaaaacagagctatctgtgtacaacctcaactttatgccgaaggatgggtgaatcttcaaattgctgttaattccgaagcattcaagtggaaggggaagtattatgtagaatcacctgctagtgcgactcaaaaaatcttctttaaggacatgaaattacacgaaaaatctccgagcgaattaaaaatca

SEQ ID NO: 571 - DNA, 500 bp, Diabrotica virgifera
  misc_feature (1)..(500): RNAi target sequence DV-HP2-FRAG11
aaattaatttaactgagtctatcacagttaatacatatactacaagccagagcagcatagaattaacaccggtaatatggagccgacccattccactcggttggtacttccagttccaatgggaaaaccagtacggtaaaaattggcccaaatatctatgtgacgattggctgagaacggacagatatctaaaaaacttcgcccacgaacttgctcaatgtccctgcaccgtcgaacaggctttagctgacaagggcaggtttatgccagacttcgattgcgacaaagattcgaacccgatttgttactataacaaccaagcacttcattgtgtgaaaactggatctcccactttagaaggctccgaacaacaatgttgctatgataaaaacggctttttgatgctctcttacgatcagcaatggggttctagtccgagacgttgccacaacttgggtaaaatgccttacaatgaagcgacaaaagtgcctactctctca

SEQ ID NO: 572 - DNA, 310 bp, Diabrotica virgifera
  misc_feature (1)..(310): RNAi target sequence DV-HP2-FRAG12
ggtgttactatttacactccaagctacatccttaatcaatcagaagtcatcattatgtttgacaatggagctggaatggaggttgtcgacaatcaaggattcatgagtgcaagagtatttttgccttggtcgtttataaataaaaccataggcctttttggaaattggagttttaacaaagaagatgacttcacacttccagatggttctagagcagcaatagtgaataacataaatgacatggaaagggtttacaatgattttggttccaaatggatgttggaggatgtgttagatcctcaaaagggta

SEQ ID NO: 573 - DNA, 1327 bp, Diabrotica virgifera
  misc_feature (1)..(1327): RNAi target sequence DV-RYANR-FIS
ggggataataagttcgattttttacgaaaatgacaagtatcgagactgtggggaccattgtcctgaaattgctgaagttggtgatcaatttgatatgtctcatcttgtaccgaaccggatatcaaggctacttcttgggagtaggaggaacctggaatctaaacgaagaaaaaaatcccgatgcagaaattgtggcttccggcgtattcgtaggatttatgatttacacattcgtctcgctgatcagcctttgcttcgctagtggagatcacaaaacgacattcactgatattctgatgaatatagtagggatttttatgtggatagctgctggagctacagctcttcattattggcttgggtacttgtccgaatacaaatacacgacaatagattctgaacgacaagttggtttggcgttaggagcgatgtgtataataaatggagcggtctatcttgtagacggagtactttccgcaatctttatcctcaaagccaaaatgcaataactttcatcgtaatataaatatatttatttaggttatatactttactttaagcagctcaagtataccgtgacatcccactcatacatcaatgtctataattgtttcatgacaaatcatttaatagtattttaaagcattcattcgttcaacaccttttttacatttttcaagtattatatcaatctttttaaagaattgtttggctattaaccggattcaatccatatagttccgtaaaataattatgcgttttaataattaatgtaattaaaaatagttagtatatttttgaaataaaacaactgccgcaacaaattagggagaatacttttgtctcctgtagttttatctgttatccaaagttcgattaaattgtttcaatttaatgtatttttccatataacgcaccaaatagtcttaaaaaaatagtgcctgttactacctaatactttctacgtatgccttatggttagtagtggctccaataggtgcattttacatttttcatgaaaattcaattcacattattttcctcccgttctcttcatattatatttatttattctttaatatagttttgggcgtgaagcccagtaaatacctatatgaagtatattgatggaactgccatgcttgatgggttttgtctgcaattaaaataaaaccaaaacaaacatttgtacagtattgtaaaattcacaatatttaggtagatgtttaaaatttaatattttttaagagtttgcatttatgttaatcgtagttaagtttttataaaaatttagtagttgtgagaaataaaataagtaaaagagaaa

SEQ ID NO: 574 - DNA, 193 bp, Diabrotica virgifera
  misc_feature (1)..(193): RNAi target sequence DV-RYANR-FRAG1
tttacgaaaatgacaagtatcgagactgtggggaccattgtcctgaaattgctgaagttggtgatcaatttgatatgtctcatcttgtaccgaaccggatatcaaggctacttcttgggagtaggaggaacctggaatctaaacgaagaaaaaaatcccgatgcagaaattgtggcttccggcgtattcgtag

SEQ ID NO: 575 - DNA, 145 bp, Diabrotica virgifera
  misc_feature (1)..(145): RNAi target sequence DV-RYANR-FRAG2
acgaaaatgacaagtatcgagactgtggggaccattgtcctgaaattgctgaagttggtgatcaatttgatatgtctcatcttgtaccgaaccggatatcaaggctacttcttgggagtaggaggaacctggaatctaaacgaag

SEQ ID NO: 576 - DNA, 83 bp, Diabrotica virgifera
  misc_feature (1)..(83): RNAi target sequence DV-RYANR-FRAG3
accattgtcctgaaattgctgaagttggtgatcaatttgatatgtctcatcttgtaccgaaccggatatcaaggctacttctt

SEQ ID NO: 577 - DNA, 292 bp, Diabrotica virgifera
  misc_feature (1)..(292): RNAi target sequence DV-RYANR-FRAG4
atttatgatttacacattcgtctcgctgatcagcctttgcttcgctagtggagatcacaaaacgacattcactgatattctgatgaatatagtagggatttttatgtggatagctgctggagctacagctcttcattattggcttgggtacttgtccgaatacaaatacacgacaatagattctgaacgacaagttggtttggcgttaggagcgatgtgtataataaatggagcggtctatcttgtagacggagtactttccgcaatctttatcctcaaagccaaaatgcaa

SEQ ID NO: 578 - DNA, 502 bp, Diabrotica virgifera
  misc_feature (1)..(502): RNAi target sequence DV-RYANR-FRAG5
ataataagttcgattttttacgaaaatgacaagtatcgagactgtggggaccattgtcctgaaattgctgaagttggtgatcaatttgatatgtctcatcttgtaccgaaccggatatcaaggctacttcttgggagtaggaggaacctggaatctaaacgaagaaaaaaatcccgatgcagaaattgtggcttccggcgtattcgtaggatttatgatttacacattcgtctcgctgatcagcctttgcttcgctagtggagatcacaaaacgacattcactgatattctgatgaatatagtagggatttttatgtggatagctgctggagctacagctcttcattattggcttgggtacttgtccgaatacaaatacacgacaatagattctgaacgacaagttggtttggcgttaggagcgatgtgtataataaatggagcggtctatcttgtagacggagtactttccgcaatctttatcctcaaagccaaaatgcaa

SEQ ID NO: 579 - DNA, 199 bp, Diabrotica virgifera
  misc_feature (1)..(199): RNAi target sequence DV-RYANR-FRAG6
gcagctcaagtataccgtgacatcccactcatacatcaatgtctataattgtttcatgacaaatcatttaatagtattttaaagcattcattcgttcaacaccttttttacatttttcaagtattatatcaatctttttaaagaattgtttggctattaaccggattcaatccatatagttccgtaaaataattatgcg

SEQ ID NO: 580 - DNA, 197 bp, Diabrotica virgifera
  misc_feature (1)..(197): RNAi target sequence DV-RYANR-FRAG7
ctgccgcaacaaattagggagaatacttttgtctcctgtagttttatctgttatccaaagttcgattaaattgtttcaatttaatgtatttttccatataacgcaccaaatagtcttaaaaaaatagtgcctgttactacctaatactttctacgtatgccttatggttagtagtggctccaataggtgcattttac

SEQ ID NO: 581 - DNA, 142 bp, Diabrotica virgifera
  misc_feature (1)..(142): RNAi target sequence DV-RYANR-FRAG8
gatttatgatttacacattcgtctcgctgatcagcctttgcttcgctagtggagatcacaaaacgacattcactgatattctgatgaatatagtagggatttttatgtggatagctgctggagctacagctcttcattattg

SEQ ID NO: 582 - DNA, 129 bp, Diabrotica virgifera
  misc_feature (1)..(129): RNAi target sequence DV-RYANR-FRAG9
cacattcgtctcgctgatcagcctttgcttcgctagtggagatcacaaaacgacattcactgatattctgatgaatatagtagggatttttatgtggatagctgctggagctacagctcttcattattg

SEQ ID NO: 583 - DNA, 152 bp, Diabrotica virgifera
  misc_feature (1)..(152): RNAi target sequence DV-RYANR-FRAG10
ggcttgggtacttgtccgaatacaaatacacgacaatagattctgaacgacaagttggtttggcgttaggagcgatgtgtataataaatggagcggtctatcttgtagacggagtactttccgcaatctttatcctcaaagccaaaatgcaa

SEQ ID NO: 584 - DNA, 587 bp, Diabrotica virgifera; identical to SEQ ID NO: 85
  misc_feature (1)..(587): RNAi target sequence DV-RYANR-RASRHO-FIS

SEQ ID NO: 585 - DNA, 163 bp, Diabrotica virgifera
  misc_feature (1)..(163): RNAi target sequence DV-RYANR-RASRHO-FRAG1
aagacggaagatccatggcagagaaaatcaatgcttttgcatatctagaatgttctgccaaaagtaaggagggtgtaagagaggtttttgaaaatgctacccgagctgcactgcaagtcaaaaagaagaagaagccccgttgtgtaatgttttgagccactac

SEQ ID NO: 586 - DNA, 178 bp, Diabrotica virgifera
  misc_feature (1)..(178): RNAi target sequence DV-DEAD-FRAG1
gaggattctagtagccacaaacttatttggacgtggaatggatatcgaaagagtgaacatcgtcttcaactatgacatgcccgaagattctgacacttacctgcacagagtagcccgagctggacgtttcggtaccaaaggtctagccattactttcgtatcagaagagggagatgcc

SEQ ID NO: 587 - DNA, 152 bp, Diabrotica virgifera
  misc_feature (1)..(152): RNAi target sequence DV-HPP15-FRAG1
ggacaactgaccttcatcactcaagtgactggcagtgtaaaataccaagagaaaacaccaaaaacctttcagcgaaacttcataattacagcacagggcgataaatggaaaattgtcagtgattgtatgaggctgcaagaaccattaaacgc

SEQ ID NO: 588 - DNA, 402 bp, Diabrotica virgifera
  misc_feature (1)..(402): RNAi target sequence DV-HPP15-BPSAR2-FRAG1
ttccattggtaacatgaggtttacgacgttcgatttggggggccacgagcaggctaggagagtgtggagggactactttccagcagtcgatgccatagtgttccttgttgatgccaacgacagctcaagatttgtagaaagccaggaacagctaaatgccctcctctcagacgaaactctatcaaactgtccaatacttatcttaggtaataaaattgatctcccaggtgctgcttcggaagatgaattacgaactagattcggcttgtttggccaaaccacaggcaaaggcaaagtagccagaaatgatctacccggtaggcctctagaactatttatgtgctctatactcaaaagacaaggttatggagaaggtttccgttggttggcacaatatatcga

SEQ ID NO: 589 - DNA, 171 bp, Diabrotica virgifera
  misc_feature (1)..(171): RNAi target sequence DV-HPP15-BPSAR2-FRAG2
ccattggtaacatgaggtttacgacgttcgatttggggggccacgagcaggctaggagagtgtggagggactactttccagcagtcgatgccatagtgttccttgttgatgccaacgacagctcaagatttgtagaaagccaggaacagctaaatgccctcctctcagacg

SEQ ID NO: 590 - DNA, 137 bp, Diabrotica virgifera
  misc_feature (1)..(137): RNAi target sequence DV-HPP15-BPSAR2-FRAG3
ttgatctcccaggtgctgcttcggaagatgaattacgaactagattcggcttgtttggccaaaccacaggcaaaggcaaagtagccagaaatgatctacccggtaggcctctagaactatttatgtgctctatactc

SEQ ID NO: 591 - DNA, 135 bp, Diabrotica virgifera
  misc_feature (1)..(135): RNAi target sequence DV-HPP15-BPSAR2-FRAG4
ggccacgagcaggctaggagagtgtggagggactactttccagcagtcgatgccatagtgttccttgttgatgccaacgacagctcaagatttgtagaaagccaggaacagctaaatgccctcctctcagacgaa

SEQ ID NO: 592 - DNA, 294 bp, Diabrotica virgifera
  misc_feature (1)..(294): RNAi target sequence DV-HPP15-BPSAR2-FRAG5
ctttataatttgtcgttgaaaaagatagggctccaaagtcctattgccaacaaaaaaacaacgcaagacattaaacaacttttttcaagcccatctgtatttaaaaaaacagtgcaaaatgtttctgtgggactggtttacgggaatgctgggatatctaggattgtggaagaaacctggaaaactattattcttaggactggataacgcaggcaaaactacccttctacatatgctcaaggatgacagactggcccagcatcttcccacgttacatcccacatcagaggagct

SEQ ID NO: 593 - DNA, 407 bp, Diabrotica virgifera
  misc_feature (1)..(407): RNAi target sequence DV-HPP15-BPSAR2-FRAG6
ttaattatgtatttttccatttcgttctgtcattgagttaggatattaatgtttgaggaactattggcaacactgcaactacctgattcatttcagatcttaggtactttacataaatatctaaatatagatgttggcaatgtaattttgaacaacagtatatacattcaatgtaaattatatatttttagttaagttaccttcttaaatggtgtttgagtggctatggtactgaaatagtttgactttttgtgttcttcgataactaaaaatgatttcttgtggaaagttacactcagaattacatagttaacttctttatcagcagttgttgtcaagatttccattttgagacgattgttttgtaaattaggtgggaatttttaaaatgttggactgttttttaa

SEQ ID NO: 594 - DNA, 168 bp, Diabrotica virgifera
  misc_feature (1)..(168): RNAi target sequence DV-HP1-FRAG1
ggggaaggtaaatcagtattcacttgatcttcaaggtagattaacgcaagtagaaatctaaaacatgtctggacgtggtaagggaggcaaagttaagggaaaagcaaagtcccgatcaaatcgtgctggtttacaatttcctgtaggtcgtattcatcgtttattgag

SEQ ID NO: 595 - DNA, 190 bp, Diabrotica virgifera
  misc_feature (1)..(190): RNAi target sequence DV-HP1-FRAG2
ggggaaggtaaatcagtattcacttgatcttcaaggtagattaacgcaagtagaaatctaaaacatgtctggacgtggtaagggaggcaaagttaagggaaaagcaaagtcccgatcaaatcgtgctggtttacaatttcctgtaggtcgtattcatcgtttattgagaaaaggaaattatgccgaaaga

SEQ ID NO: 596 - DNA, 159 bp, Diabrotica virgifera
  misc_feature (1)..(159): RNAi target sequence DV-HP1-FRAG3
ttggaattggcaggaaatgcagctagagataacaaaaagacccgtataattcctagacatttacaattggccataagaaatgacgaggaattgaacaaattactgtcaggagttaccatcgcccaaggtggagtattgcctaatatacaagcagtactt

SEQ ID NO: 597 - DNA, 196 bp, Diabrotica virgifera
  misc_feature (1)..(196): RNAi target sequence DV-RNAPOL-FRAG1
ctgttttaaagccatggctgatgaagaatttgacgaaaatgatgtagcagatgatttcgatgacgacgtagaggatgataatatcgaagaactcgaacaacccgaggaagatggagataacatcgatatccttgctccaggacaagcaggaggtggtgtaccaaaaaacaagaggataacaactaaatatatgacc

SEQ ID NO: 598 - DNA, 163 bp, Diabrotica virgifera
  misc_feature (1)..(163): RNAi target sequence DV-CPNN-FRAG1
ctgttggtgctacttgtcttccacgcctaacagctcccacatctcaagaacttggttacgcagatattgtatgtgtagaagaattgggtgatacccctatagtttctttcagattggagggcaaagaatcaagaatttccacaattgtcatcagaggtgctac

SEQ ID NO: 599 - DNA, 236 bp, Diabrotica virgifera
  misc_feature (1)..(236): RNAi target sequence DV-CPNN-FRAG2
cagccaaactcatgatactaggaagtcaaatgcaagattctgaggtgggtgatggaactaactttgtgattatacttgctggagcacttttggagcatgctgaagaactaattcgtcttggagtaactcccacagaaatagcagaaggttatgagaaagcactagacaaatgtctagaaatccttcctaatcttatttgctacacaatcaaggatttcagaaacatcgaagaagtc

SEQ ID NO: 600 - DNA, 149 bp, Diabrotica virgifera
  misc_feature (1)..(149): RNAi target sequence DV-CPNN-FRAG3
ttggagcatgctgaagaactaattcgtcttggagtaactcccacagaaatagcagaaggttatgagaaagcactagacaaatgtctagaaatccttcctaatcttatttgctacacaatcaaggatttcagaaacatcgaagaagtcaa

SEQ ID NO: 601 - DNA, 194 bp, Diabrotica virgifera
  misc_feature (1)..(194): RNAi target sequence DV-CPNN-FRAG4
ctgcagatgaacttatgaactttagtaggggagaagaaaatcttcttgaattacaaatcaaatgtatagcagatgctggagctaaagttgtagttgcaggagccaaatttggagatatggctctacattacttacataaatatggcatgatggttgtcaggttgaactccaaatttgatttgagaagattatgc

SEQ ID NO: 602 - DNA, 785 bp, Diabrotica virgifera
  misc_feature (1)..(785): RNAi target sequence DV-TEF2-FRAG1
tctggtaacatctgtggtttggttggtgttgatcaattcttggttaagactggtaccattaccactttcaaggatgcccacaacttgaaggtcatgaaattcagtgtatctcctgtagtacgtgttgctgttgaacctaagaaccctgctgatttgccaaaacttgtagaaggtttgaaacgtttgaccaaatccgatcctatggtccaatgtatcattgaagaatctggtgagcacatcattgctggtgccggagaattgcatcttgaaatttgccttaaggatcttgaagaagatcatgcctgcattcccattaagaaatctgaccctgttgtatcctaccgtgagacagtaagtgaagagtctgatcagatgtgcctctcaaaatcacccaacaaacacaacagattgttcatgaaagcttgtcctatgcctgatggacttgctgaagatattgatgatggtaaagttaacccacgtgatgacttcaaagtccgtgcccgttatcttactgagaaatatgactatgatataactgaagcccgtaagatctggtgctttggacctgatggtactggacccaacatccttgttgattgtactaagggagtgcaatatcttaatgaaatcaaagactctgtggtagctggtttccaatgggcaaccaaagaaggtgtcttgtctgaagaaaacttgagaggtgttagattcaacatttatgatgttaccttacacgctgatgctatccatcgtggaggtggtcaaatcattccaacaacccgtag

SEQ ID NO: 603 - DNA, 144 bp, Diabrotica virgifera
  misc_feature (1)..(144): RNAi target sequence DV-SRP54-FRAG1
tgggaggcatcaaaggtctcttcaaaggtggcgatatggctaaaaacgtcaaccacaaccagatggcgaaacttaatcaacaaatggccaaaatgatggaccctagagtcctccaacaaatgggcggcatggcaggtttgcaaa

SEQ ID NO: 604 - DNA, 364 bp, Diabrotica virgifera
  misc_feature (1)..(364): RNAi target sequence DV-SRP54-FRAG2
acgagttggacaacagggatggcgcaaaattgtttactaaacaagttggtagagtggtcagggtagcacaaggatctggtgtaacagaaagagaagtaaaagatctcattacgcagtacacaaaattcgcagcggtggtaaagaaaatgggaggcatcaaaggtctcttcaaaggtggcgatatggctaaaaacgtcaaccacaaccagatggcgaaacttaatcaacaaatggccaaaatgatggaccctagagtcctccaacaaatgggcggcatggcaggtttgcaaaatatgatgagacaactccaagcaggcgcagctggtggtttagggggcttaggtaatcttatggggggctttgg

SEQ ID NO: 605 - DNA, 226 bp, Diabrotica virgifera
  misc_feature (1)..(226): RNAi target sequence DV-SRP54-FRAG3
gtagcacaaggatctggtgtaacagaaagagaagtaaaagatctcattacgcagtacacaaaattcgcagcggtggtaaagaaaatgggaggcatcaaaggtctcttcaaaggtggcgatatggctaaaaacgtcaaccacaaccagatggcgaaacttaatcaacaaatggccaaaatgatggaccctagagtcctccaacaaatgggcggcatggcaggtttgc

SEQ ID NO: 606 - DNA, 163 bp, Diabrotica virgifera
  misc_feature (1)..(163): RNAi target sequence DV-SRP54-FRAG4
ttatcagaaaaagaactggaaatcatgtttggtatgtgcagatacattcagagctggtgcctacgatcaggtaaaacagaactgtacaaaagctaggatacccttttatggaagttacacagaagttgatcctgtagtcatagcccaggatggtgttgatatg

SEQ ID NO: 607 - DNA, 171 bp, Diabrotica virgifera
  misc_feature (1)..(171): RNAi target sequence DV-TIF3-FRAG1
gttgagtgctgtttctggagaagatgcccaagaccgttcagatcgtacaattcttactccgtgggttaagttcctttgggaatcttactgtcaatgtttggaacttttgcgtacaaatgcacatgttgagaacttgtatcatgatatagccaggatggctttccagttttg

SEQ ID NO: 608 - DNA, 232 bp, Diabrotica virgifera
  misc_feature (1)..(232): RNAi target sequence DV-TIF3-FRAG2
atcgtggggatcgcagggacgatagggagaggagagacgacagggataacagggataggagagacgacagagatcgtagagatgatagggataggagagacgacagggagcgtagagatgatagagagagaagagatgaccgtggcggaagagatgataaccgggaccgccgagacgatcgtgatcgtagagacgacagggaccgaagaggcggggacgaaggtacttggcg

SEQ ID NO: 609 - DNA, 166 bp, Diabrotica virgifera
  misc_feature (1)..(166): RNAi target sequence DV-TIF3-FRAG3
ggcaaccgcgacagcggaagatttggcgacagagacagagaaggtggtgtcagattcacgagagataatcgggataatcgtggggatcgcagggacgatagggagaggagagacgacagggataacagggataggagagacgacagagatcgtagagatgataggg

SEQ ID NO: 610 - DNA, 239 bp, Diabrotica virgifera
  misc_feature (1)..(239): RNAi target sequence DV-TIF3-FRAG4
gcaagtccacaactacaagatttgtacaattggctggaagtggagttccatcctttactattgtgtcagagagtgcatgaggtaatcaaatctctcgaatctgaagaaaatgcagccctccaacaatatgtgccagctttacaagatgtaactctggtgcgtctagtgagacagatagcacaagtctatcagaccatagaatttgctaggttgatccagattgccaaatttactacacc

SEQ ID NO: 611 - DNA, 227 bp, Diabrotica virgifera
  misc_feature (1)..(227): RNAi target sequence DV-TIF3-FRAG5
ggttgattgtgtgagacacaatgatatgcaaattcgtattgatcatggcaaagactgtatccactttggaatggacctgagtgaaagccaaagagaggacaaaccagagggacccactttgcaagttatgcctagtgagcaagtcagaaatcaacttattaacatgtctactgtattgaatcaagccatacaagtcattaatcctaataagaagaagcttgaacgcg

SEQ ID NO: 612 - DNA, 224 bp, Diabrotica virgifera
  misc_feature (1)..(224): RNAi target sequence DV-TIF3-FRAG6
tgttataagagggtatttgcggatggcagaagaaagaacagagaatgctagagaacagtcagcacaagcagttattgatatcgatgatttagataatttggctacacctgaaagtatattgttgagtgctgtttctggagaagatgcccaagaccgttcagatcgtacaattcttactccgtgggttaagttcctttgggaatcttactgtcaatgtttggaac

SEQ ID NO: 613 - DNA, 154 bp, Diabrotica virgifera
  misc_feature (1)..(154): RNAi target sequence DV-TIF3-FRAG7
aagactgtatccactttggaatggacctgagtgaaagccaaagagaggacaaaccagagggacccactttgcaagttatgcctagtgagcaagtcagaaatcaacttattaacatgtctactgtattgaatcaagccatacaagtcattaatcc

SEQ ID NO: 614 - DNA, 742 bp, Diabrotica virgifera
  misc_feature (1)..(742): RNAi target sequence DV-TIF3-FRAG8
ctggcaagtccacaactacaagatttgtacaattggctggaagtggagttccatcctttactattgtgtcagagagtgcatgaggtaatcaaatctctcgaatctgaagaaaatgcagccctccaacaatatgtgccagctttacaagatgtaactctggtgcgtctagtgagacagatagcacaagtctatcagaccatagaatttgctaggttgatccagattgccaaatttactacaccttttcatctggagagacttttggttgattgtgtgagacacaatgatatgcaaattcgtattgatcatggcaaagactgtatccactttggaatggacctgagtgaaagccaaagagaggacaaaccagagggacccactttgcaagttatgcctagtgagcaagtcagaaatcaacttattaacatgtctactgtattgaatcaagccatacaagtcattaatcctaataagaagaagcttgaacgcgaaaaacttagagctgttatggttcagaattatcacgaaacaaaggttagagaacaccagaaaattttacaaagacacaagattattgaggacagaaaggaatatattgagcgtttgaatacagtcagggaagaagaggagcagaaaagattggaagaaatgcaacggcagcacttactggccgaacaaaaacgattggaccaagaaagagaagaaagagagcggaaacgtgctctaaatgaaatccagcagg

SEQ ID NO: 615 - DNA, 619 bp, Diabrotica virgifera
  misc_feature (1)..(619): RNAi target sequence DV-TIF3-FRAG9
ccaacaatatgtgccagctttacaagatgtaactctggtgcgtctagtgagacagatagcacaagtctatcagaccatagaatttgctaggttgatccagattgccaaatttactacaccttttcatctggagagacttttggttgattgtgtgagacacaatgatatgcaaattcgtattgatcatggcaaagactgtatccactttggaatggacctgagtgaaagccaaagagaggacaaaccagagggacccactttgcaagttatgcctagtgagcaagtcagaaatcaacttattaacatgtctactgtattgaatcaagccatacaagtcattaatcctaataagaagaagcttgaacgcgaaaaacttagagctgttatggttcagaattatcacgaaacaaaggttagagaacaccagaaaattttacaaagacacaagattattgaggacagaaaggaatatattgagcgtttgaatacagtcagggaagaagaggagcagaaaagattggaagaaatgcaacggcagcacttactggccgaacaaaaacgattggaccaagaaagagaagaaagagagcggaaacgtgctctaaatgaaatccagcag

SEQ ID NO: 616 - DNA, 713 bp, Diabrotica virgifera
  misc_feature (1)..(713): RNAi target sequence DV-EIF-4A-FRAG2
cgtctagcacatcgtttggcatggtagccgaaagtaaaattacctgtacgtcagtgttcaacattttgaacacgtcatgaatttgatctttaaaaccccttgacaacatttcatcggcttcatccaaaacaaacatttttatatgagtcggccttaaggctctccttgttatcatatcataaactctaccaggtgtaccaactacaacatgtacgccagtttcaagttttcttatgtcttctcgtacattggtaccaccaatacatgcatgacactgcgctgacatgaaatctcctagggcaattactactttttggatctgttgagccaattcacgagttggtgccaatataagagcttggcactccctcactgacgtgtcaatttgttgtaaaatagagatggagaatgttgcagtcttaccagtacctgactgagcctgagcaataacatcgtgtccctttacacaaggaatgatggctctctgttggatagcagaaggtttttcaaaaccataggcataaattcctcttaaaagttcctcttttaggttcatgtcgtcgaaattatcgaccacctcttcccagttggattcaataatgccatcaggctccatacctggtgggccgtcatagccttggggctggctgtcttcattagctgggccattcttgtcccactcttcacgacgatctggcatagacatgtctact

SEQ ID NO: 617 - DNA, 200 bp, Diabrotica virgifera
  misc_feature (1)..(200): RNAi target sequence DV-EIF-4A-FRAG3
tctatgccagatcgtcgtgaagagtgggacaagaatggcccagctaatgaagacagccagccccaaggctatgacggcccaccaggtatggagcctgatggcattattgaatccaactgggaagaggtggtcgataatttcgacgacatgaacctaaaagaggaacttttaagaggaatttatgcctatggttttgaaaa

SEQ ID NO: 618 - DNA, 270 bp, Diabrotica virgifera
  misc_feature (1)..(270): RNAi target sequence DV-PAT3-SS1
tcaacattgataaacacataggaatggcattttcaggcttaatagctgatgcaaggcaaatcgttgagattgctagaaaagaagcatcaaattatagacatcaatatggttcaaatattcctcttaaatacctaaatgatagagtaagcatgtacatgcatgcatacactttatacagtgctgttagaccatttggttgcagtgtcatcttggccagttatgaagatagtgacccatctatgtatctgattgatccatctggagttagct

SEQ ID NO: 619 - DNA, 322 bp, Diabrotica virgifera
  misc_feature (1)..(322): RNAi target sequence DV-PAT3-FRAG5
ggggagtcgtcaacatcaatttcaagtttcaagaaaaagcaaatcactacgacttgccggattttgtagtagtgttaattttgtattaaaaaatcaaaatgagttctattggaactgggtacgatttatcagcttcccaattctctcctgatggaagagtatttcaagttgaatatgcaatgaaagcagttgaaaatagtggcaccgtaataggcctccgaggtacagatggcattgtattggctgctgaaaagctcattatgtcaaaattgcatgaaccaagtacaaataaacgaattttcaacattgataaacacatagg

SEQ ID NO: 620 - DNA, 322 bp, Diabrotica virgifera
  misc_feature (1)..(322): RNAi target sequence DV-PAT3-FRAG6
aatggcattttcaggcttaatagctgatgcaaggcaaatcgttgagattgctagaaaagaagcatcaaattatagacatcaatatggttcaaatattcctcttaaatacctaaatgatagagtaagcatgtacatgcatgcatacactttatacagtgctgttagaccatttggttgcagtgtcatcttggccagttatgaagatagtgacccatctatgtatctgattgatccatctggagttagctatggatactttggatgtgctacaggtaaagcaaaacagtctgcaaagactgaaatagaaaaattgaagatgggg

SEQ ID NO: 621 - DNA, 161 bp, Diabrotica virgifera
  misc_feature (1)..(161): RNAi target sequence DV-PAT3-FRAG7
ggggagtcgtcaacatcaatttcaagtttcaagaaaaagcaaatcactacgacttgccggattttgtagtagtgttaattttgtattaaaaaatcaaaatgagttctattggaactgggtacgatttatcagcttcccaattctctcctgatggaagagta

SEQ ID NO: 622 - DNA, 161 bp, Diabrotica virgifera
  misc_feature (1)..(161): RNAi target sequence DV-PAT3-FRAG8
tttcaagttgaatatgcaatgaaagcagttgaaaatagtggcaccgtaataggcctccgaggtacagatggcattgtattggctgctgaaaagctcattatgtcaaaattgcatgaaccaagtacaaataaacgaattttcaacattgataaacacatagg

SEQ ID NO: 623 - DNA, 161 bp, Diabrotica virgifera
  misc_feature (1)..(161): RNAi target sequence DV-PAT3-FRAG9
aatggcattttcaggcttaatagctgatgcaaggcaaatcgttgagattgctagaaaagaagcatcaaattatagacatcaatatggttcaaatattcctcttaaatacctaaatgatagagtaagcatgtacatgcatgcatacactttatacagtgctg

SEQ ID NO: 624 - DNA, 161 bp, Diabrotica virgifera
  misc_feature (1)..(161): RNAi target sequence DV-PAT3-FRAG10
ttagaccatttggttgcagtgtcatcttggccagttatgaagatagtgacccatctatgtatctgattgatccatctggagttagctatggatactttggatgtgctacaggtaaagcaaaacagtctgcaaagactgaaatagaaaaattgaagatgggg

SEQ ID NO: 625 - DNA, 162 bp, Diabrotica virgifera
  misc_feature (1)..(162): RNAi target sequence DV-PAT3-FRAG11
ttgtattaaaaaatcaaaatgagttctattggaactgggtacgatttatcagcttcccaattctctcctgatggaagagtatttcaagttgaatatgcaatgaaagcagttgaaaatagtggcaccgtaataggcctccgaggtacagatggcattgtattg

SEQ ID NO: 626 - DNA, 160 bp, Diabrotica virgifera
  misc_feature (1)..(160): RNAi target sequence DV-PAT3-FRAG12
gctgctgaaaagctcattatgtcaaaattgcatgaaccaagtacaaataaacgaattttcaacattgataaacacataggaatggcattttcaggcttaatagctgatgcaaggcaaatcgttgagattgctagaaaagaagcatcaaattatagacatc

SEQ ID NO: 627 - DNA, 161 bp, Diabrotica virgifera
  misc_feature (1)..(161): RNAi target sequence DV-PAT3-FRAG13
aatatggttcaaatattcctcttaaatacctaaatgatagagtaagcatgtacatgcatgcatacactttatacagtgctgttagaccatttggttgcagtgtcatcttggccagttatgaagatagtgacccatctatgtatctgattgatccatctgga

SEQ ID NO: 628 - DNA, 80 bp, Diabrotica virgifera
  misc_feature (1)..(80): RNAi target sequence DV-PAT3-FRAG14
ggggagtcgtcaacatcaatttcaagtttcaagaaaaagcaaatcactacgacttgccggattttgtagtagtgttaatt

SEQ ID NO: 629 - DNA, 81 bp, Diabrotica virgifera
  misc_feature (1)..(81): RNAi target sequence DV-PAT3-FRAG15
ttgtattaaaaaatcaaaatgagttctattggaactgggtacgatttatcagcttcccaattctctcctgatggaagagta

SEQ ID NO: 630 - DNA, 80 bp, Diabrotica virgifera
  misc_feature (1)..(80): RNAi target sequence DV-PAT3-FRAG16
tttcaagttgaatatgcaatgaaagcagttgaaaatagtggcaccgtaataggcctccgaggtacagatggcattgtatt

SEQ ID NO: 631 - DNA, 81 bp, Diabrotica virgifera
  misc_feature (1)..(81): RNAi target sequence DV-PAT3-FRAG17
ggctgctgaaaagctcattatgtcaaaattgcatgaaccaagtacaaataaacgaattttcaacattgataaacacatagg

SEQ ID NO: 632 - DNA, 80 bp, Diabrotica virgifera
  misc_feature (1)..(80): RNAi target sequence DV-PAT3-FRAG18
aatggcattttcaggcttaatagctgatgcaaggcaaatcgttgagattgctagaaaagaagcatcaaattatagacatc

SEQ ID NO: 633 - DNA, 81 bp, Diabrotica virgifera
  misc_feature (1)..(81): RNAi target sequence DV-PAT3-FRAG19
aatatggttcaaatattcctcttaaatacctaaatgatagagtaagcatgtacatgcatgcatacactttatacagtgctg

SEQ ID NO: 634 - DNA, 80 bp, Diabrotica virgifera
  misc_feature (1)..(80): RNAi target sequence DV-PAT3-FRAG20
ttagaccatttggttgcagtgtcatcttggccagttatgaagatagtgacccatctatgtatctgattgatccatctgga

SEQ ID NO: 635 - DNA, 81 bp, Diabrotica virgifera
  misc_feature (1)..(81): RNAi target sequence DV-PAT3-FRAG21
gttagctatggatactttggatgtgctacaggtaaagcaaaacagtctgcaaagactgaaatagaaaaattgaagatgggg

SEQ ID NO: 636 - DNA, 644 bp, Diabrotica virgifera
  misc_feature (1)..(644): RNAi target sequence DV-PAT3-FIS (TR)
ggggagtcgtcaacatcaatttcaagtttcaagaaaaagcaaatcactacgacttgccggattttgtagtagtgttaattttgtattaaaaaatcaaaatgagttctattggaactgggtacgatttatcagcttcccaattctctcctgatggaagagtatttcaagttgaatatgcaatgaaagcagttgaaaatagtggcaccgtaataggcctccgaggtacagatggcattgtattggctgctgaaaagctcattatgtcaaaattgcatgaaccaagtacaaataaacgaattttcaacattgataaacacataggaatggcattttcaggcttaatagctgatgcaaggcaaatcgttgagattgctagaaaagaagcatcaaattatagacatcaatatggttcaaatattcctcttaaatacctaaatgatagagtaagcatgtacatgcatgcatacactttatacagtgctgttagaccatttggttgcagtgtcatcttggccagttatgaagatagtgacccatctatgtatctgattgatccatctggagttagctatggatactttggatgtgctacaggtaaagcaaaacagtctgcaaagactgaaatagaaaaattgaagatgggg

SEQ ID NO: 637 - DNA, 367 bp, Diabrotica virgifera
  misc_feature (1)..(367): RNAi target sequence DV-PAT3-FRAG22
aatctaacatgcaaagaacttgttaaagaagcagccaaaatcatttatttggtccatgatgagctgaaggataagaattttgaactggaactttcatgggtatgcaaagatacgaatggtttacataccaaagtgcctgaatcagtgtttgctgatgcagaaaaagctgccaaacaaatggaagcagattcagaatcagatacagaagatatgtaataactacatttagtttttaatatttcgctgatggtggctgttcttacaatatttcgtgtgttatgttcatatattatgtaatactgtgagaatttccatttcaaggataggtttataacttttttttctaataaatacataactttatgtc

SEQ ID NO: 638 - DNA, 182 bp, Diabrotica virgifera
  misc_feature (1)..(182): RNAi target sequence DV-PAT3-FRAG23
aatctaacatgcaaagaacttgttaaagaagcagccaaaatcatttatttggtccatgatgagctgaaggataagaattttgaactggaactttcatgggtatgcaaagatacgaatggtttacataccaaagtgcctgaatcagtgtttgctgatgcagaaaaagctgccaaacaaatgga

SEQ ID NO: 639 - DNA, 185 bp, Diabrotica virgifera
  misc_feature (1)..(185): RNAi target sequence DV-PAT3-FRAG24
agcagattcagaatcagatacagaagatatgtaataactacatttagtttttaatatttcgctgatggtggctgttcttacaatatttcgtgtgttatgttcatatattatgtaatactgtgagaatttccatttcaaggataggtttataacttttttttctaataaatacataactttatgtc

SEQ ID NO: 640 - DNA, 256 bp, Diabrotica virgifera
  misc_feature (1)..(256): RNAi target sequence DV-PAT5-FRAG1
atcaagaacatttgttcagtttgacgcaaaggcgataggatcaggatccgagggtgcacagcaaagtttacaggaggcatatcatcgcagtatgaccctggaagaagctaccacaactgctttaacaattctaaaacaagttatggaagaaaagttgaattcttcaaatgttgaggttatgactatgactccaaaagatatgttccacatgttcacaaaggaacaagtggaagaggtaattgctaaattgtcttaa

SEQ ID NO: 641 - DNA, 200 bp, Diabrotica virgifera
  misc_feature (1)..(200): RNAi target sequence DV-PAT6-FRAG1
aatcatgtctagaggaagcagtgcaggttttgaccgacacataacaattttctcgcccgaaggccgactctatcaagtagagtatgcttttaaagccattaaccaagccggccccacttcggtagcagtccgaggagtagatgctgcggcgtgtgtgacccagagaaagatcccggataagctgattgatcccaacacaa

SEQ ID NO: 642 - DNA, 216 bp, Diabrotica virgifera
  misc_feature (1)..(216): RNAi target sequence DV-PAT6-FRAG2
cagaacacactggatgtgtgatgactggcatgattgctgacagcaagtcccaggtgcagagagctagatatgaggctgccgagttcaaatataagtttggatatgagatgccaatcgatgccttgtgtaggagagtatcggatatttcccaggtttatacgcagaatgctgagatgagacctttgggttgctccatgcttctgataggatatgacc

SEQ ID NO: 643 - DNA, 200 bp, Diabrotica virgifera
  misc_feature (1)..(200): RNAi target sequence DV-PAT6-FRAG3
cacatctgttccagttaacagaacacactggatgtgtgatgactggcatgattgctgacagcaagtcccaggtgcagagagctagatatgaggctgccgagttcaaatataagtttggatatgagatgccaatcgatgccttgtgtaggagagtatcggatatttcccaggtttatacgcagaatgctgagatgagacct

SEQ ID NO: 644 - DNA, 195 bp, Diabrotica virgifera
  misc_feature (1)..(195): RNAi target sequence DV-PAT6-FRAG4
aggagagtatcggatatttcccaggtttatacgcagaatgctgagatgagacctttgggttgctccatgcttctgataggatatgaccaagaaatgggaccatgtgtccacaaagctgaccctgctggctattactgtggctacagagcagtaagtgtaggatccaaacaaactgaagccaacagctacctagag

SEQ ID NO: 645 - DNA, 199 bp, Diabrotica virgifera
  misc_feature (1)..(199): RNAi target sequence DV-PAT6-FRAG5
aagaagctaaagaagaaaactgatctgtccaaagatgaagtcatccaattggcaatcagttgtctttcaagtgttttatctgtagattttaaaccaacagaagtcgaagttggggttgttactaaggatgagcccaagtttaggaaattgacggaacaagaaatagatttccatctgacagctattgctgagagggatt

SEQ ID NO: 646 - DNA, 165 bp, Diabrotica virgifera
  misc_feature (1)..(165): RNAi target sequence DV-PAT6-FRAG6
aggagagtatcggatatttcccaggtttatacgcagaatgctgagatgagacctttgggttgctccatgcttctgataggatatgaccaagaaatgggaccatgtgtccacaaagctgaccctgctggctattactgtggctacagagcagtaagtgtaggatcc

SEQ ID NO: 647 - DNA, 157 bp, Diabrotica virgifera
  misc_feature (1)..(157): RNAi target sequence DV-PAT6-FRAG7
gagaagaagctaaagaagaaaactgatctgtccaaagatgaagtcatccaattggcaatcagttgtctttcaagtgttttatctgtagattttaaaccaacagaagtcgaagttggggttgttactaaggatgagcccaagtttaggaaattgacgg

SEQ ID NO: 648 - DNA, 196 bp, Diabrotica virgifera
  misc_feature (1)..(196): RNAi target sequence DV-BETA2-FRAG1
gcactcagaagcagaagtgcataccatgtaaaccttcttctagctggatatgatgacaaagaaggtcctcagctatattacatggactacctagcatccatagcaagcgttgattatgctgctcatggttatggaggattcttttcactgtcaattatggatcgtaattatcggcagaaccttagtaaagaagaag

SEQ ID NO: 649 - DNA, 187 bp, Diabrotica virgifera
  misc_feature (1)..(187): RNAi target sequence DV-BETA2-FRAG2
tttcactgtcaattatggatcgtaattatcggcagaaccttagtaaagaagaaggttacgaacttttgaaaaaatgtgtgaaagaagttcagaaaagattgatcatcaatttgcctaactttaaggtgcagtgtgttgataaaaatggcatccaggatatgcctaatatcactgctaaggatttggt

SEQ ID NO: 650 - DNA, 155 bp, Diabrotica virgifera
  misc_feature (1)..(155): RNAi target sequence DV-BETA2-FRAG3
cagatgcactcagaagcagaagtgcataccatgtaaaccttcttctagctggatatgatgacaaagaaggtcctcagctatattacatggactacctagcatccatagcaagcgttgattatgctgctcatggttatggaggattcttttcactg

SEQ ID NO: 651 - DNA, 174 bp, Diabrotica virgifera
  misc_feature (1)..(174): RNAi target sequence DV-BETA3-FRAG1
tgtgaagcactttgggagcctaacctaggacctgaggatctttttgaaaccatctctcaagctctcatcaatgcctttgacagagatgccatttctggttggggagctacagtgtacatcatagaaaaaaataaggtgactgtaaaaaatttgaagacacgtatggactagtta

SEQ ID NO: 652 - DNA, 203 bp, Diabrotica virgifera
  misc_feature (1)..(203): RNAi target sequence DV-PROTB-FRAG1
taccagagaacaaaacaaacttttcccactatcaggcactactgttttgggttgtgcaggatgttggtgtgacactctaacattaaccagaatccttaaatctcgcatgcagatgtaccaacaagagcataacaaaacaatgtctacaactgcatgtgcccagatgttgtcaaccatgctctactacaagagattctttcctt

SEQ ID NO: 653 - DNA, 291 bp, Diabrotica virgifera
  misc_feature (1)..(291): RNAi target sequence DV-PBT6.2-FRAG1
tatagtgtaaaactgatttttttattttaatatataccaaaacataccaaagcttaaaaaataatcaattaaccttcataaaatttgggcaattcatttcctaaaacaactcttcgttcaataccagcttcagtgatgatccccagtctgactacacctcctgaagaaccatctcttgacatggcaagtgccaatgtatttgtgacaaacttcacacattcttccttgctcatattgggcttgaagttggcatctacgtaaccataaacataactggaacctgatcctccg

SEQ ID NO: 654 - DNA, 277 bp, Diabrotica virgifera
  misc_feature (1)..(277): RNAi target sequence DV-PBT6.2-FRAG2
attgacacttcttgtctaacacacatcccaccaattggtatggaatatacttgtccgcctttctttttatcccaacctgctaccagtataccagccattagcgaatctctataattgtagcaaagttcttggaaaatggcggcacctacttgtactttgggttcttcaccaagttccataccatgaaaattaagatgataagcaacaatgtctgcaattgcttgtgtatctgctgcagatcctgaacgacaacagtatatatggtcagtgactttgg

SEQ ID NO: 655 - DNA, 257 bp, Diabrotica virgifera
  misc_feature (1)..(257): RNAi target sequence DV-PBT6.2-FRAG3
tgagtttgtctgctacccggtttgcaatgtaggccccagtagttgtgcgagaatctgctcctataacaacgcctccatcaaactccgcggccataatagaggttcctgtactgtgagcggcatctctccaatcattaggaccagtcattgcaccatactcagtcataagaggcattttttacaagtttaatgaaaagaatacaagcttagaaaaattacacttgtaatcctgcaatgcaatattttgccagtccccc

SEQ ID NO: 656 - DNA, 273 bp, Diabrotica virgifera
  misc_feature (1)..(273): RNAi target sequence DV-PBT6.2-FRAG4
caggaacctctattatggccgcggagtttgatggaggcgttgttataggagcagattctcgcacaactactggggcctacattgcaaaccgggtagcagacaaactcaccaaagtcactgaccatatatactgttgtcgttcaggatctgcagcagatacacaagcaattgcagacattgttgcttatcatcttaattttcatggtatggaacttggtgaagaacccaaagtacaagtaggtgccgccattttccaagaactttgctacaatt

SEQ ID NO: 657 - DNA, 219 bp, Diabrotica virgifera
  misc_feature (1)..(219): RNAi target sequence DV-PBT6.2-FRAG5
ggctggtatactggtagcaggttgggataaaaagaaaggcggacaagtatattccataccaattggtgggatgtgtgttagacaagaagtgtcaatcggaggatcaggttccagttatgtttatggttacgtagatgccaacttcaagcccaatatgagcaaggaagaatgtgtgaagtttgtcacaaatacattggcacttgccatgtcaagagatgg

SEQ ID NO: 658 - DNA, 151 bp, Diabrotica virgifera
  misc_feature (1)..(151): RNAi target sequence DV-PBT6.2-FRAG6
ttagacaagaagtgtcaatcggaggatcaggttccagttatgtttatggttacgtagatgccaacttcaagcccaatatgagcaaggaagaatgtgtgaagtttgtcacaaatacattggcacttgccatgtcaagagatggttcttcagg

SEQ ID NO: 659 - DNA, 229 bp, Diabrotica virgifera
  misc_feature (1)..(229): RNAi target sequence DV-BETA7-FRAG1
ggctacagttttgtgtccagaaataccaacgcctggtttttcattcgaaaattgtaaaagaaatgcacttctggaaaataagggccttgctcttccaaaagccactaaaacaggtactacgatcgtaggaatagtctacaaagatggaattattcttggagcagatactagagctacagaagacaccacagttgcagacaagaactgtgaaaagattcacttccttgca

SEQ ID NO: 660 - DNA, 285 bp, Diabrotica virgifera
  misc_feature (1)..(285): RNAi target sequence DV-BETA7-FRAG2
gctaaattagaactccacagattatacacaaaccgagttactagagtgtgtacagcaaaccaattgttaaaacaatatctatttcgctaccagggatatattggggctgctttaatcctgggtggtgttgatattgaaggaccacatctatatatgatttatccacatggatccagtgttgatcttccttatgctacaatgggttctggttccttagcagccatatctgtctttgaatcccgctggaagcctcaaatggaagaggaagatggtgtccaactagta

SEQ ID NO: 661 - DNA, 188 bp, Diabrotica virgifera
  misc_feature (1)..(188): RNAi target sequence DV-BETA7-FRAG3
agacatctgtgtaataagaaagggttcagtagactacaaacgaacctatgacgaggctaacaaaaagggagttaaacaaggatcttatagatatcaaagaggaaccactgcagtgcttagtacccaggtggtggatgttgaggaagtctcagtgattcccattgaagctgaagaaatggatgttgctt

SEQ ID NO: 662 - DNA, 150 bp, Diabrotica virgifera
  misc_feature (1)..(150): RNAi target sequence DV-BETA7-FRAG4
aaggaccacatctatatatgatttatccacatggatccagtgttgatcttccttatgctacaatgggttctggttccttagcagccatatctgtctttgaatcccgctggaagcctcaaatggaagaggaagatggtgtccaactagtaa

SEQ ID NO: 663 - DNA, 168 bp, Diabrotica virgifera
  misc_feature (1)..(168): RNAi target sequence DV-BETA7-FRAG5
cattcgaaaattgtaaaagaaatgcacttctggaaaataagggccttgctcttccaaaagccactaaaacaggtactacgatcgtaggaatagtctacaaagatggaattattcttggagcagatactagagctacagaagacaccacagttgcagacaagaactgtg

SEQ ID NO: 664 - DNA, 156 bp, Diabrotica virgifera
  misc_feature (1)..(156): RNAi target sequence DV-BETA7-FRAG6
gctaaattagaactccacagattatacacaaaccgagttactagagtgtgtacagcaaaccaattgttaaaacaatatctatttcgctaccagggatatattggggctgctttaatcctgggtggtgttgatattgaaggaccacatctatatatg

SEQ ID NO: 665 - DNA, 220 bp, Diabrotica virgifera
  misc_feature (1)..(220): RNAi target sequence DV-NATP1-FRAG1
tgaatatcacatctgcagcgggaattatttccctcttggatgaaccaagaccagaattaaaagtatttgcactgaagaaactagattccatagtgggtgagttttggccggagatctcagaagctatcgaaaaaatcgaaattttgcatgaagacaaagttttccagcaacaccagttagctgcacttgtggcaagtaaggtatattaccatttaggcgc

SEQ ID NO: 666 - DNA, 222 bp, Diabrotica virgifera
  misc_feature (1)..(222): RNAi target sequence DV-NATP1-FRAG2
ttttgaagactctttaacttatgctcttggtgcgggtgatctctttgatgtcaatgcccggagtgagtatgtagaaactattctagctaaatgtatcgactattacactcagcaacgtattgctgtagctgaaggattggcagatgccaaacccatagactctcgccttgaagctattgttaatcgaatgtttcagaggtgtcttgatgatggtcaatatcg

SEQ ID NO: 667 - DNA, 204 bp, Diabrotica virgifera
  misc_feature (1)..(204): RNAi target sequence DV-NATP1-FRAG3
tcaagctatgggcctggctctagaaaccagacgaatggatatctttgagtcatctattactcagtctgatgatattatcagcatgttgacttatgcatttcaagtagcgatgagtttgattcaaaatcgagcatttagaaacactgttttgagatctcttgttggactttatagaggactggttacacctgattacgttaatat

SEQ ID NO: 668 - DNA, 155 bp, Diabrotica virgifera
  misc_feature (1)..(155): RNAi target sequence DV-NATP1-FRAG4
tgtatcgactattacactcagcaacgtattgctgtagctgaaggattggcagatgccaaacccatagactctcgccttgaagctattgttaatcgaatgtttcagaggtgtcttgatgatggtcaatatcgtcaagctatgggcctggctctaga

SEQ ID NO: 669 - DNA, 226 bp, Diabrotica virgifera
  misc_feature (1)..(226): RNAi target sequence DV-NATP1-FRAG5
attaacactaatgcaaagttacttgccgaaagaagttggacccagctcaggttattccgaagggggcggcctttatgctcttggtcttatacatgccaaccatggtacaaatatcattgattaccttcttggacaacttaaggatgcacagaatgagatggtgagacatggaggttgtcttggtctaggtttggctgctatgggcactcatagacaggatgtttat

SEQ ID NO: 670 - DNA, 205 bp, Diabrotica virgifera
  misc_feature (1)..(205): RNAi target sequence DV-NATP1-FRAG6
gaacaactcaaattcaatttataccaagatgatgccaatactggtgaagcagctggtattgcaatgggaatggtaatgttgggttcaagtaattctaccacaattatggatatggttgcatacgcacaagagagtcaacatgagaaaattcttagaggcttagctgttggtattagtttttccatgtatggtagattagaagaag

SEQ ID NO: 671 - DNA, 236 bp, Diabrotica virgifera
  misc_feature (1)..(236): RNAi target sequence DV-NATP1-FRAG7
cagatccactgattcaacaacttacctctgataaagatcctatcctcagaagatcaggaatgtatactttgggtatggcatattgtggtactggacacaaccaagcaattagaaaactacttcatgtagctgtgtcagatgtcaacgatgatgttagaagagctgcagttacagctttaggttttctgttattcagaactcctgaacaatgtcctagtgtagtatcccttctagct

SEQ ID NO: 672 - DNA, 200 bp, Diabrotica virgifera
  misc_feature (1)..(200): RNAi target sequence DV-NATP1-FRAG8
gtatggtagattagaagaagcagatccactgattcaacaacttacctctgataaagatcctatcctcagaagatcaggaatgtatactttgggtatggcatattgtggtactggacacaaccaagcaattagaaaactacttcatgtagctgtgtcagatgtcaacgatgatgttagaagagctgcagttacagctttag

SEQ ID NO: 673 - DNA, 199 bp, Diabrotica virgifera
  misc_feature (1)..(199): RNAi target sequence DV-NATP2-FRAG1
tgggcgatacaaaggtagaacctacaaaggtggataaaacaaaggggactgaggacaaaaacaaaaatgaactgtcggaagaagacaaacagcttcaagatgaattaaatttgtgtgttgagaaactccaggataacgatgaaaagagatacctacttgctttgcaagctttatcaaatcatattcaagcctcaactac

SEQ ID NO: 674 - DNA, 198 bp, Diabrotica virgifera
  misc_feature (1)..(198): RNAi target sequence DV-NATP2-FRAG2
gcctcaactacttcgatgacttctgttcctaagccgttaaaatttatgaggccccattacgaaaccatgaagacagtacatgaaaaaattactgatcctgatactaaaaaagtctgtgcagatattatatctgttttagctatgacaatgggagaaggcagagaatgtttgaaataccgtcttctttctaatttggat

SEQ ID NO: 675 - DNA, 190 bp, Diabrotica virgifera
  misc_feature (1)..(190): RNAi target sequence DV-NATP2-FRAG3
acatctaccatagagtgtgcttatatctcaccagctgtgtaccctatgtggcagatcctgagaatactactctactgcagactgctcttttactgtttagaaagtttgatcagtatccccaggcactgagattagcaatgcagttaaatgactttggattaattgaagaaatttttgtcaactgcccaga

SEQ ID NO: 676 - DNA, 223 bp, Diabrotica virgifera
  misc_feature (1)..(223): RNAi target sequence DV-NATP2-FRAG4
cggacgtacaaaaacaactggcatttatgctaggacgacaacagatatatgttgaaattcctgagcatacgcctgaatacgaagatctaatcgagataatggcaaactgtcatcttaataaccacttcttgaacctcgctcgcgagttggacattatggatcctaaaacccccgaagacgtttacaaatcccatttagaaaatagtcgtcctccatttggtgg

SEQ ID NO: 677 - DNA, 165 bp, Diabrotica virgifera
  misc_feature (1)..(165): RNAi target sequence DV-NATP2-FRAG5
tgctaggacgacaacagatatatgttgaaattcctgagcatacgcctgaatacgaagatctaatcgagataatggcaaactgtcatcttaataaccacttcttgaacctcgctcgcgagttggacattatggatcctaaaacccccgaagacgtttacaaatccc

SEQ ID NO: 678 - DNA, 156 bp, Diabrotica virgifera
  misc_feature (1)..(156): RNAi target sequence DV-NATP2-FRAG6
catctaccatagagtgtgcttatatctcaccagctgtgtaccctatgtggcagatcctgagaatactactctactgcagactgctcttttactgtttagaaagtttgatcagtatccccaggcactgagattagcaatgcagttaaatgactttgg

SEQ ID NO: 679 - DNA, 222 bp, Diabrotica virgifera
  misc_feature (1)..(222): RNAi target sequence DV-NATP3-FRAG1
cttgtgcaggccatgagaaaagcaccccagaatgctgccattggtttcagacaggttgttcaaaagcttactgttgtagttgaactactgctaggagatataccagaacgacagatttttagacaatctagtatgaggcactcccttgccccatactttcaactaacacaagcagttagaatgggcaatttgcaaagatttggtgaggtgttagagaacttc

SEQ ID NO: 680 - DNA, 222 bp, Diabrotica virgifera
  misc_feature (1)..(222): RNAi target sequence DV-NATP3-FRAG2
ggcccacaatttagacaagatcatacatttacactaattttgagactgcgccacaatgttattaaaacagctataagatccataggattatcatactccagaatatctccccaagacatagctaagaaactggggctggattcagctgaagatgcagaatttatagtagcaaaagcaatcagagatggggtgatagaagctacacttgatccacagggaggt

SEQ ID NO: 681 - DNA, 159 bp, Diabrotica virgifera
  misc_feature (1)..(159): RNAi target sequence DV-NATP3-FRAG3
caatctagtatgaggcactcccttgccccatactttcaactaacacaagcagttagaatgggcaatttgcaaagatttggtgaggtgttagagaacttcggcccacaatttagacaagatcatacatttacactaattttgagactgcgccacaatgtt

SEQ ID NO: 682 - DNA, 161 bp, Diabrotica virgifera
  misc_feature (1)..(161): RNAi target sequence DV-NATP7-FRAG1
ctttagttagatctattgtcgctctacacaatcttattaacaacaaactaacaaatagagacgcggaagaaggaaaaaaggaggatagtaagaaagaaagcaaagataaggacaaggataaagagaaggaaaaggataaagatgctaagaaggacgagaag

SEQ ID NO: 683 - DNA, 151 bp, Diabrotica virgifera
  misc_feature (1)..(151): RNAi target sequence DV-NATP8-FRAG1
ttgccaaaaaggctttccagctcaaaccgtggaagctcaacaatgactttttccactttcttcctgaagagaagacccacgaacccataccctcacaggaactggcacagcaggctatagagtatgccaaggaacttgaaatgattgtcta

SEQ ID NO: 684 - DNA, 163 bp, Diabrotica virgifera
  misc_feature (1)..(163): RNAi target sequence DV-NATP8-FRAG2
gctggacaccataagagaagaaattgcagactgtttatcagtagcctatgaaaagatctcagtaaaagacgtagccagaatgctgtacctgccaaacgaagaagctgctaaaacatttgccaaaaaggctttccagctcaaaccgtggaagctcaacaatgac

SEQ ID NO: 685 - DNA, 172 bp, Diabrotica virgifera
  misc_feature (1)..(172): RNAi target sequence DV-NATP8-FRAG3
tgtacaagcagttaaaatcagaatggaataccaacaacccaaatttaagtaaatgtgaaaaactactctcaactcttaagcttgagctcaccaatctaatgtttctgccgattaccacatctactgcgtccaaacaagaactacttctagccagagatgttctagagatagg

SEQ ID NO: 686 - DNA, 673 bp, Diabrotica virgifera
  misc_feature (1)..(673): RNAi target sequence DV-NATP14
actcacggttgtttttgtaaaacttgtaggtaacgaattttcgtttttagtgaattaacaaaacaacagagtgattttccaacaagaataacttatttattagtttcattaatttgataaacaataaaatggatagacttcttcgactaggaggtggaatgccaggtttaactcaggcaccgccgccttctgatgctcctgttgtggatactgccgaacaagtatacatatcctccttagcactattaaaaatgttgaagcacggccgagctggagtacccatggaagtaatgggtcttatgttaggagaattcgtagatgactataccgttcgtgtaatcgatgtatttgctatgcctcagactggtaccggtgtcagtgtagaagctgctgatccagtgtttcaaacaaaaatgcttgacgtgttaagacagactggtaggccagaaatggttgtggggtggtatcattcccatccaggtttcggatgttggttgtctggagtggatatcaacacccagcaaagttttgaggctctcacggaaagagctgtagcagtagtagttgatccaatccagtcagtgaaaggcaaagtcgttattgatgcctttaggttaataaatccgaatatgatggtattgggccaagaacctcgccaaactacatccaactt

SEQ ID NO: 687 - DNA, 246 bp, Diabrotica virgifera
  misc_feature (1)..(246): RNAi target sequence DV-NATP14-FRAG1
aactttagcagattactctgaaaattgtagtgtgaatgaaaagactgtagctgatatgttagaactagccaagaattacaacaaggcattagaagaggaggagaaaatgactccagaacagctcgctattaaaaatgttggcaaacaagatcctaagaggcatttagaagaaaaggttgatattttgatgaccaataatatcgtccagtgcttgggagctatgctagatacagttgtttttaagta

SEQ ID NO: 688 - DNA, 205 bp, Diabrotica virgifera
  misc_feature (1)..(205): RNAi target sequence DV-ATP5-FRAG1
tgacggtaattaacaagatggaggtggacggaggtccgaagggagaaggttttcggtcatattatattacaaagattgaagaattgcagcttatagtggcygaaaagagtcaaaatcttagacgtttgcaagctcagagaaatgaactcaatgccaaagttcgtatgttgagagaagaactgatgttacttcaagagcaaggaag

SEQ ID NO: 689 - DNA, 219 bp, Diabrotica virgifera
  misc_feature (1)..(219): RNAi target sequence DV-ATP5-FRAG2
ctatgtcggagaagttgtaaagcccatggataagaaaaaagtccttgtgaaagttcatccagaaggaaaatttgtagttgacattgacaaaaacatagacataaatgatgttactccaaattgtcgagtagccctcagaaatgaatcttacacattgcacaaaatacttccaaacaaggttgatcctttagtttccttgatgatggtggagaaagtccc

SEQ ID NO: 690 - DNA, 244 bp, Diabrotica virgifera
  misc_feature (1)..(244): RNAi target sequence DV-ATP5-FRAG3
tagattggacatcttaaagattcactccagaaaaatgaacctcacaagaggaataaatctgagaaaaatagctgagttgatgccaggtgctagtggagctgaagttaagggtgtgtgtacggaagctggtatgtatgcactaagagaacgaagggtgcatgttactcaagaagattttgaaatggccgtcgccaaagttatgcagaaggattctgagaagaatatgtccatcaagaagttgtgg

SEQ ID NO: 691 - DNA, 163 bp, Diabrotica virgifera
  misc_feature (1)..(163): RNAi target sequence DV-ATP5-FRAG4
gattgaagaattgcagcttatagtggcygaaaagagtcaaaatcttagacgtttgcaagctcagagaaatgaactcaatgccaaagttcgtatgttgagagaagaactgatgttacttcaagagcaaggaagctatgtcggagaagttgtaaagcccatggat

SEQ ID NO: 692 - DNA, 176 bp, Diabrotica virgifera
  misc_feature (1)..(176): RNAi target sequence DV-ATP5-FRAG5
tagctgagttgatgccaggtgctagtggagctgaagttaagggtgtgtgtacggaagctggtatgtatgcactaagagaacgaagggtgcatgttactcaagaagattttgaaatggccgtcgccaaagttatgcagaaggattctgagaagaatatgtccatcaagaagttgtgg

SEQ ID NO: 693 - DNA, 1432 bp, Diabrotica virgifera
  misc_feature (1)..(1432): RNAi target sequence ta00611.03_diavv
cagaatcttatctgtaaagataaactaattatctctattgactcacctcattttatacgtagcaggtgaaaatacaccattgtagtgaaaattattattagttcgatttataataagttcgattttttacgaaaatgacaagtatcgagactgtggggaccattgtcctgaaattgctgaagttggtgatcaatttgatatgtctcatcttgtaccgaaccggatatcaaggctacttcttgggagtaggaggaacctggaatctaaacgaagaaaaaaatcccgatgcagaaattgtggcttccggcgtattcgtaggatttatgatttacacattcgtctcgctgatcagcctttgcttcgctagtggagatcacaaaacgacattcactgatattctgatgaatatagtagggatttttatgtggatagctgttggagctacagctcttcattattggcttgggtacttgtccgaatacaaatacacgacaatagattctgaacgacaagttggtttggcgttaggagcgatgtgtataataaatggagcggtctatcttgtagacggagtactttccgcaatctttatcctcaaagccaaaatgcaataactttcatcgtaatataaatatatttatttaggttatatactttactttaagcagctcaagtataccgtgacatcccactcatacatcaatgtctataattgtttcatgacaaatcatttaatagtattttaaagcattcattcgttcaacaccttttttacatttttcaagtattatatcaatctttttaaagaattgtttggctattaaccggattcaatccatatagttccgtaaaataattatgcgttttaataattaatgtaattaaaaatagttagtatatttttgaaataaaacaactgccgcaacaaattagggagaatacttttgtctcctgtagttttatctgttatccaaagttcgattaaattgtttcaatttaatgtatttttccatataacgcaccaaatagtcttaaaaaaatagtgcctgttactacctaatactttctacgtatgccttatggttagtagtggctccaataggtgcattttacatttttcatgaaaattcaattcacattattttcctcccgttctcttcatattatatttatttattctttaatatagttttgggcgtgaagcccagtaaatacctatatgaagtatattgatggaactgccatgcttgatgggttttgtctgcaattaaaataaaaccaaaacaaacatttgtacagtattgtaaaattcacaatatttaggtagatgtttaaaatttaatattttttaagagtttgcatttatgttaatcgtagttaagtttttataaaaatttagtagttgtgagaaataaaataagtaaaagagaat

SEQ ID NO: 694 - DNA, 730 bp, Diabrotica undecimpunctata
  misc_feature (1)..(730): RNAi target sequence ta01434.01_diaun
tttatacgtagcaagtgaaaatacaccatcgtagtgaaaattaatattagttaaaacgaaaagttcgattttttacgaaaatgacaagtatcgagactgtggggacaattgtcctgaaattgctcaaactggtgatcaatttgatatgtctcatcttgtaccgaaccggttatcagggctactttttaggagtaggaggaacctggaatctaaacgaagaaaaaaatcccgatgcagaaatcgtcgcctccggagtattcgtaggattcatgatttatacattcgtctcgctgatcagcctttgcttcgctagtggagatcacaaaacgacattcactgatattctgatgaatatagttgggatttttatgtggatagctgttggagctacagctcttcattattggcttgggtacttgtccgaatacaaatacacaacagtagattctgaacgacaggtcggtttggcgttaggatcgatgtgtatagtaaatggagcggtctatcttgtagacggagtactttccgcaatcttcatcctcaaagccaaaatgcaataaatttcatcgtaatataaatatatttatttagtttctatattttactttaagcagctcaagtgtaccgtgacatccaacacaaatcaatatccataattgtttcatgacaaatcatttaataatattttaaagcattcattcattcaacaccttttttatatttccaagta

SEQ ID NO: 695 - DNA, 1629 bp, Diabrotica barberi
  misc_feature (1)..(1629): RNAi target sequence ta01092.02_diab
tattgactcacctcattttatacgtagcaggtgaaaatacaccattgtagtgaaaattattattagttcgatttataaaaagttcgattttttacgaaaatgacaagtatcgagactgtggggaccattgtcctgaaactactcaaattggtgatcaatttgatatgtctcatcttgtaccgaaccggatatcaaggccacttcttgggagtaggaggaacctggaatctaaacgaagaaaaaaatcccgatgcagaaattgtggcttccggcgtattcgtaggatttatgatttacacattcgtctcgctgatcagcctttgcttcgctagtggagatcacaaaacgacattcactgatattctgatgaatatagtagggatttttatgtggatagctgttggagctacagctcttcattattggcttgggtacttgtccgaatacaaatacacaacaatagattctgaacgacaggttggtttggcgttaggatcgatgtgtataataaatggagctgtctatcttgtagacggagtactttccgcaatctttatcctcaaagccaaaatgcaataactttcatcgtaatataaatatatttatttaggttatatactttactttaagcagctcaagtataccgtgacgtcccatacatgcatcaatgtctataattgtttcatgacaaatcatttaatagtattttaaagcattcattcattcaacacctttttttacatttttcaagtataatatattatacctacctatagttcgttcgctaaactcagacacaactggctagtgatttcggtagataatttttttgattttggacaattttaccaaaattactaactacatatttagtaattattttttgccaattttacgaaattgtcaaaattacttactaaaatcaatagccagttgtgtctgagtttagcgaactgactatatcaatctttttaaagaattgtttggctgttaaccggattcaatccgtatagttccgtaaaataattatgcattttaataattaatgtaattaaaagtagttagtatatttctgaaataaaacaactgccgcaacaaattaggaagaatacttttgtcccctgtatttttatgttatccaaagttcgattcaattgtttcaatttaatgtatttttctatataacgcaccaaatagccttaaaaaaatagtacctactaataccttctactacctaatactttctacgtatgccttatggttagtcgtggctacaataggtgcattttacattttttcctgaaaattcaattcacattcttttcctcccgtgctcttcatattatatttatttattctttaatatatttttgggcgtgaagctctgaagcccagtaaatatatatgaagtatattgatggaactgccctgcttgatgggttttttctgcaattaaaataaaaccaaaacaaaaatttgtacagtattgtaaaattcacaatatttaggtagatgtttaaaatttaatattttttaagagtttgcatttatgttaatcgtagtttaaagtttttataaaaatgtagtagttgtgagaaataaaataaaaccaaaacaaaaatttgtaca

SEQ ID NO: 696 - DNA, 720 bp, Epilachna varivestis
  misc_feature (1)..(720): RNAi target sequence ta26722.002_epiva
gtaaaaactgacttaattaggtttcagtatttttcttgtggttaatttggaaagtgtacgaaaatgaccagtatagagacagttggtgctatagctattcgtgttctgaaactggtaataaatattattgtcattatcctctaccgaacgggcaaccatggggcttttcttggtgtcggtggaacatggaacttaaacgaggaaaaaacggctgacgtggaaattatagcttctggagtattcgttgggtatttgatatacacagcggtctccttgttgagcttattatttggaacaagagacaacaaagtatatttcactgatgtcataatggggcttgttggaatactgatgtggcttacagttggtgcagctgccctacattactggattgggtttatcgacgaacacaaatacacagctgtatcttcggaacgatcggttggtctagcactgggcgccatgtgcatcctaaattcggtcctctatttgatagacacagtggtttcaacgttattcgtagttagagagaaattaaatggctcatttgcttgatgtgtagtaaattcttacaattaggtttacttttatacttttttctatttgttttactgaagattttctctatggagaattcaatcgacccgtgaattgtgttcgcagccatactgttagaatgaagcgaaaaactgaagattttctctatggagattcaactga

SEQ ID NO: 697 - DNA, 1043 bp, Leptinotarsa decemlineata
  misc_feature (1)..(1043): RNAi target sequence ta37400.0001_lepde
acccactgtttccatactagtcattttggcacaatcttatcagtcgagataacgtgattatctgtaccaacttactcacctcattttgttccatagcaggtgctttgtgcctaacagaaatatttgtgacttttcaaagttgattgaagataaacttgtgccaaaatgactagtatggaaacagtgggtacccttttcataaaactgctgaaattggtgatcaatataatcgttttaattttatatcgaacaggattccagggggaatttttgggagtaggtggaacatggaatttgaacgaagagaagaatccggatgcagaaatcgtggcctccggtgtttttgttggttatataatatataacattgtcagtatgatcagcttttgcttcgccactttggatcacaaatacaacttcacagatatcctgatgaatataattggtcttttgctgtgggtagcagtaggagcaactgctatccactattggcacggttatttggccgaacataaatatacccacgtcgactcggagagatcggttggattggccatggggtccctttgcgtcctgaatggtgcagcatatttgatagattcagtgctatcgataatattcttggttaaaacaaaaatgaattgagatcattcactaacctgatatgcatataggataatacttttcttaagttttttatatagaataaaattacgacatgacatgttctgatgatgatacattaaatcctttaagagatagatatcaccagataccaagcacagcatgctgaaatacattctttcattcatatagaattctttaatcatttttgagtagttgggaaaaaccgaatttgtattagtattcattgtaacttatattttagtgtatgtgtccgtttgtaataaaatgaattattgaaaatgtatcgatttcaattcaatcatgagtataattgaacacaataaagaggaacctcagggaagttactgaaataatcgttttatactttaaaataaatattctttaggataaaaaaa

SEQ ID NO: 698 - DNA, 648 bp, Orius insidiosus
  misc_feature (1)..(648): RNAi target sequence ta01487.01_oriin
acgacgctcttccgatctgtgaattaaaaaaaaaagggggacatcaaaaaatcaaagaaaaatggaaatggaaactataattacgatttttattaaagtcataaaatgggtgataaatctcattgtaatcttcttataccgatacggttattctgggcaattcctcggtattggaggaacgtggaatttgaatgaggagaaagatgcgacagcagaagttgtcgcttcgggcgtcctcgtcggctactttatctacacttcggtcattctaatggcattctgttttgggacgacaaaacataaagcgagcgttgtcgacataataatgaacataactgggacgatactttttgtcgcagtcggcggagtggcacttcactactgggccggatatcaaaacatgaatcatttccagccgatagcgactgaaaaacaagtcggtttcgccgtcgggagcctctgcgtcatcgaaggtgccatttatttagtcgacaccgtcctaacttttgttcacatcgttaaaaagaacgacctcttttaatcaaaagtacaaaaaacaatattttactttaaagaaaaattttaatttttataaattttgtattacaactgaagtattataataatattaatcttttttaaaaaaaa

SEQ ID NO: 699 - DNA, 820 bp, Coleomegilla maculata
  misc_feature (1)..(820): RNAi target sequence ta21166.0001_vibdu
aggatcagcttaactatcctaatagctatatctccctgtgttccactctgatcctatattcacttgtttttgtgtgtggtgtttttcatcataatttaattggtaaaaaaaataattttcgttttttttgtggaaaagtgagtgaaaatgacgagtatcgaaaccattggagctatagctattaggatagttaagctgatcctaaatctcatcattttgataatgtatcgaacaggaaatcacggaggttttcttggtgttggtggtacttggaacttgaacgaagaaaaaacagcagatgttgaaatcattgcttcaggagtcttcgttggctacttcatctataccgcagtctcacttatgagtatcctcttcggtaccagagataataaagtatatttcactgacgtcataatgggagtcattggcgtttttatgtggatcacagttggtgcagcagctctgcactattggcacgggtacttggatgaacacaaatacaaatcagtttcatcagaaagaacggtgggattaattatgggctcgttgtgcatcctgaatgcagctttatatctattagactcagtggttgccgttctgttcgtcgtaagagaaaaattaaatggccaattttgaaaaataatttcataattcataagtgtttttttgtattttttcaaatatgaaatcgacaacgagagtttaagtccaaccagaactgatttccagaatgacaaaagccccaaaggctatcctcactgcagttatttcgaaatagtggatacttataatttttaatgaagagcaaatatgaaatcga

SEQ ID NO: 700 - DNA, 5238 bp, Diabrotica undecimpunctata
  misc_feature (1)..(5238): RNAi target sequence ta00809.07_diaun
cgaactttactaaccgtagctactttttttgatgtgatctttatgttgcgctcatcagtagtgcgccagtttgtagtgccaattaaccaaaatgtggttaaagtactttgttatttttgttttgtttagtgttagcattaaaggacaagacgatggacttccaccagatgtagaaactatcgacaccaatgtaagtaacgcggagccagatgtagggaaacctattccggtggaagatacgcctaatggagtgtctccagtgaatccaaactatgaagtagataaatccctagttaatgtaagcaatagtttggtaaatgtgactaaaaatcccagacggacttatcagacagttaacaaactgggcaaatattcgacattttatgctgcagattacgatcctatgacctcagacaccgctccaccagacactgaccaacgaggaggagggactccatacactataaccgaaacgagattggcagaaataaggaaacattttatgtacccatttttcgataaaggaggtagtgataataacttgggagatttccaaaaggacattcaatcttccattcctcaggtgcacaagaatttaaacttccaattgcctttctttggattcaggtataactacacaagagtgtcagtgaatggatatctggaatttagcgacccacctccaaattatgactatcctttagtatttcctattaaagaatggcccaaaaagaatgatcctgcctttattggtatattcttcagcagatgcagaatcggtaatcttcgtgatggagacgtcgatcaaagaacaccaggggtctattttagaatggaaagagatttaagaaccaggcaagacagaatgggtgtagaaattagagaaagacttaaatgggacatcagagaaggcgtcattggatctgacaccttcgatcctaagcacgccgtgattgtcacttggaaaaatgtttccttcactggaggattcgctaatgctaagtacaagacaaacaccttccaaatggttcttgcaactgacgaagtattcacttacgcgatgttcaactacctaaacttggactggacctcccacactgaagccggtggtgattcgcaaaacggagaaggtggtgtcagtgcctacgttggttttaacgcgggaaatggtactagaagctacgaatacaatccttacagtcaagcttccgtcattcgagatcttacttcagttggatttggaaatggttttaagggaagacatattttccgtattgatgaggaaattttgcttggatcgtgcaacaaagatatagatggtgccaaccttcccctgaaattcgctcctgaaagtggtaatatgttgggaggaaccgtggtaaatataacaggtccatgcttcaatttgaatgataggattcgatgcaagtttgacgtttcaaatgaagtattcggttatgttgttgataagaacagagctatatgcgtacagccccaactgtttgccgaaggatgggttaatcttcaaattgctataaattctgaatcattcaagtggaagggaaagtattatgtagaatccccttctagtgcaacccaaaaaatcttcttcaaggacatgaaataccacgaaaaatctccgagtgaattaaaaataacttgggagaagcaaaatttgaccacaaatgaaaacgctaacatccgaatttccctctggggttacagagaaacaactatgaaaccagtgtttgtttatatcaccgatatcgcagatagtgttcaaaacattggagaatacacgattgttccttctcagtatagaactagagtaaaccaatatttgactgatattaagtttggattcctccaaattaatttaactgagtctatcaaagttaatacatacactacaacccaaacaaccatagaattaacaccggtagtatggagccggcccattccactcggttggtattttcaattccaatgggagaaccagtacggcaaaaattggcccaaaactctatgtgacgattggctgagaacggacagatatctaaagaacttcgctcacgaacttgctcagtgtccctgcaccgtcgaacaggctttagctgacaagggcaggtttatgccagatttcgactgtgacaaagattcgaatccgatttgttactataacaaccaagcacttcattgtgtgaaaactggatctcccactttagaaggttctgaacaacaatgttgctatgataaaaacggctttttgatgctctcttacgatcaacaatggggttctagtccgagacgttgccacaacttaggtaaaatgccttacaatgaagcgacaaaagttcctactctctcacaatggtttaatgatatggtacccaaatatttatgttgcctttggcaagacgagcaagctgttggatgtgaaacactgagatttgaacgtagaccaacacaagattgtgtagcttaccaagcaccaggcgtcgcaggagtctatggtgatccacactttgttactttcgacgatgtagaatatacgttcaatggaaaaggggaattcgcattggtgaaatcggttacacaaacggacaatctggaaattcaaggaagattcgagcaaatggaccctaacgcttatggtgaggttagagctactcagctgacatctgtagtagctaaaggtaataacacaatagcaattgaagtcagaaggcgaccactagattctagatggagatataggttggatgttatagcagataatagaagactgtatttcgatagaccctcactaaaattccagcacttccaaggagttactatttatactccaacctacatccttaatcaatcagaagtcatcattatgtttgacaatggagctggaatggaggttgtcgataatcaaggatacatgagtgcaagagtatttttgccttggtcgtttataaataaaaccataggcctttttggaaattggagtttcaacaaagaagacgactttacacttccagatggttccagagcagcaatagtctctaacataaatgacatggaaagggtttacactgattttggttccaaatggatgttagatgatgtgttagatcctcaaaagggtagagcgttattccatagggaatttggaagaacttcagccacttacaacaacaagacgttcaagcctcaattcctaatgaccccggaagatttcataccagccaacagaactgcggatattcagcgaacatacgaaatatgtcctctaaggatgtacgaatgttactacgattacggtatgacgcttgatagggatttggcacattataccaagaattataaagccacaatatatcaatataaagaaactacaaggaccaaagttgtgtcttgtggtgtactggaaacaccgaggtttggacgaaagagtactttcctgttcgtgcctggaactaaggttacctacgaatgcattcaggagttcgtgctggtaggtgatcagcgcagggagtgtcaagcggatggaacgtggaatattcctgaatacggatacacttattgcttacgtcagcaagaatactcccaacgacaggctggtctggcttccgggataattatggcaattcttataccgctcatcttgcttttcgtctatctagcgtatcgtttcttacaaaaaaagcagaaagagaaagaagctgaaaaattagaagagcagcaatttatggatcaacaaagaagggcacacgaagcagctactaagaagttaacagaagccgaatatgcttcagaagatgaagacagtaatgttacaagcacgggcgcaaaagaaacaactgtatattaactcctataaaatacaatgattcaacctatgagttgcaacattttaaagtttaatatttctaaaatctttatatagaataagtactagatgtagttaatgtataaataggacttttttattgtaggattaaaaatccactgatgactaaattcaaacactatgttttattcaataaagtgtagacttttttatgtttatgttccatgtagagtgtgatgtgtcaaatatggcgtttttaaccaccacgtaatgtcttcttcctatagtaaatttaatattcttcaaaggtacttgtccattgaattgtatgcctatctaatcctgtaatgcccatctttttttttcgaattaaatgaataatacaaaatttgaaaatcaaaataaattaatcaacttcatataacccggtagaaagcgatgtcctgcaactattatctaaattaatatattattcagtaaccatatcaagctctattagtggtgttatactcctgtattttataaacaacggtttgttaatccaccaacttgcttctatttgagaagatgaatcaatacgctcagctgctcacataaaatttcacatagaatcgtttcaagcaagccagagtcatactcacaatttgtcaaaatttttgccgacaaactgtatttagcatagaactatcttatactaggaagatcagaaaatatctatgccatgaacttaagcacaaaactagccaaatgaaacggcttattggaagggatatgaagtggaaaatggatgtacctaattatgctaaaagtttttcacataccaaagcatttcacaaatttcggccgaatattgttatcacagtaattgtatcttgcatcgttagtctgaaatatcatacatcgacaaaattattagatctaaaatcatcctaagctaaacatacagttcaaaaccattgttgcgtggttacaattctagttttgtgtataaacttcgtccacataagtcgaatccggtttgaatctactcacgagtttgcgataatcggacttttagatttatatatgtatctaatccaggattccaaatataataatgtctaaaatgtaattgttcaaaccgaagtaggaatctctaagaccacttaattataaaagtagttatttgaaagagaaggtaatagttacctgcgttcacatatacaaattaattagaacttgaaagaaattcgttgttaaaacacctatgaaaagaaaaattgatttagtcaacgaaggattccttctagaatgttctatgttatttattaagtacaacatattttcctaccttagtaatactttactttattagaaaatctagtacagttcgtgttaaatctcaaatttactattat

SEQ ID NO: 701 - DNA, 4313 bp, Diabrotica barberi
  misc_feature (1)..(4313): RNAi target sequence ta06241.06_diab
aaaacataactttttgactgaagaatgtttctaggtacagcggcacaaatactttggtcttaagatagtaaaataatgaaaatttataaattaaatgatactctataaactattgaagttcacttctactctaattatattctaaacgtctgtcactatactactctgactagcgctaatcctttctttaggtttctttattggttctgcatacatgtcgttatagttcaaattctttgagctgttccctctaataatgtctggtcgactataaggcgttgtatattgaatactagaagtaggactagttggacttcccgtaggcgttctagaaaccctatcgtcttcgaaggtttgatcgtaagggtccaatggcttctcctcgaactcagaattcggtctattgggcaaaggttcgtgagttctgtaggacttgtcgtaacttcttcgtttcttgctaagcgagtcagtgtcgctttgaggatacttttcgtcctcgtcttcttctctgtatggacttaaagttcgactgaattgttggagattttgagtcttttgtacggtgtcgtagtcatagttttgattgttacttgttagtctttgatatactttgtagccaccgtaacctattagaagaaccaatggtatgataattgcgaggattatacctgaagtgatggcagcttgacgcgaagaatattcttcttgacgtaagcaatatgtgtatccgtattcaggaatattccatgttccatccgcttgacactctctccgctgatcacctaccaacacgaactcttggatgcattcataggtaaccttcgtaccgggcacgaacaggaaagtactctttcgtccgaatctcggtgtttctagtactccgcaagacacaactttcctccttgtcgtttctttatattgatagatcgtggctttataattcttggtgtaatgcgccaaatccctgtcaaccgtcatagcgtaatcgtagtaacattcgtacaactttagaggacatatttcggatattcgcttaagatctgtagatctgttggttggtaggaaatcttccggattcattaggaattgaggcttgaacgttttgttgttgtaagtcgctgaagttcttccgaattccctgtgaaacagcgctctacccttttgaggatctaacacatcctccaacatccatttggaaccaaaatcattgtaaaccctttccatgtcatttatgttattgactattgctgctctagaaccatctggaagtgtgaagtcatcttctttgttgaaactccaatttccaaaaaggcctatggttttatttataaacgaccaaggcaaaaatactcttgcactcatgaatccttgattgtcgacaacctccattccagctccattgtcaaacataatgatgacttctgattgattaagaatgtaggttggagtgtaaatagtaacaccttggaagtgctggaattttagtgagggtctatcaaaataaagtcttctattatctgctataacatccaacctatatctccatctagaatctagaggtctccttctgacttcaattgctattgtgttattacctttagctactacagaagtcagctgagtagctctaacctcaccataagtgttagggtccatttgctcaaatcttccttggatttccagattgtccgtttgcgtaactgatttcaccaatgcgaattctccttttccattaaacgtatattctacatcgtcgaaagtaacaaagtgtggatcaccgtagactcctgctacacctggtgcttggtaagctacacaatcctgtgtaggtctacgttcaaatctcagtgtttcacatcccacagcttgctcgtcttgccaaagacaacacaaatatttgggtaccatgtcattaaaccattgtgagagagtaggcacttttgtcgcttcgttgtaaggcattttacccaagttgtggcaacgtctgggactagaaccccattgttgatcgtaagagagcatcaaaaagccgtttttatcatagcaacattgttgttcggagccttctaaagtgggagatccagttttcacacaatgaagtgcttggttgttatagtaacaaatcgggttcgaatctttgtcgcaatcgaagtctggcataaacctgcccttgtcagctagagcttgttcgacggtgcagggacattgagcaagttcgtgagcgaagttctttagatatctgtccgttctcagccaatcgtcacataaatatttgggccaatttttaccgtactggttttcccattggaactggaagtaccaaccgagtggaatgggtcggctccatactaccggtgttaattctatgctgctctggcttgtagtatatgtattaactttgatagactcagttaaattaatttggaggaatccaaacttaatatcagtcaaatattggttcactttagttctaaactgagaaggaacaatcgtgtattctccaatgttttgaacattatctgcgatatcggtgatataaacaaacactggtttcatagttgtttctctgtaaccccagagagaaattcgaatattagcgttgtcgtttgtggtcaaattctgcttctcccaagtgatttttaattcgctcggagatttttcgtgtaatttcatgtccttgaagaagattttttgagtcgcactagcaggagattctacataatacttccccttccacttgaatgcttcggaattaacagcaatttgaagattcacccatccttcggcataaagttgaggttgtacacagatcgctctgtttttatcaacaacatacccaaatacttcatttgatacgtcaaacttgcatcgaatcctatcattcaaattgaagcatggaccagttatatttaccactgttccacccaacatgttaccactttcaggagcgaatttcaggggaaggttggcaccatctatatctttgttgcatgatccaagcaaaatgtcttcgtctatacggaaaatatgtcttcccttaaaaccatttccaaatccaactgcagtgagatctcgaatgacggaagcttgactgtaaggattgtattcgtagcttctggtaccgtttccagcgttaaaaccaacataggcactgacaccaccttctccgttttgggaatcaccacccgcttcagtgtgggaggtccagtccaagttgaggtagttgaacatcgcgtaagtgaagacttcgtcagtggcaagaaccatttggaaggtgttggtcttgtatttagcattagcgaatcctccagtgaaagaaacgtttttccaagtgacaataacggcgtgcttaggatcgaatgtttctgatccaatgactcctgttctgatgtcccacttaagtctttctctaatttctacacccattctgtcttgcctcgttcttaaatctctttccattctaaaatagaccccgggtgttctttggtcaatgtctccatcacgcagattaccgattctgcatctgctgaagaaaataccaataaaggcaggatcattctttttgggccattctttaattggaaatactaatggatagtcataatttggaggtggatcgctgaattccagatacccattcactgaaactctcgtgtaattatatctgaatccaaagaaaggcaactggaagtttaaattcttgtgcacctgaggaatggaagattgaatgtccttttggaaatctcccaagttattatcactgcctcctttatcgaaaaatgggtacataaaatgtttccttatttctgccagtcttgtttctgttatagtgtatggagttcctcctcctcgttggtcagtgtctggtggagctgtgtctgaggtcataggatcgtaatctgcagcataaaatgtcgaatatttgcccagtttgttaactgtctgataagtccgtctgggatttttagtcacatttaccaaactattggttacattaactaaggatttatctacttcatagtttggattaactggagcgactccattaggtgtatcttccaccgggataggtttccctgcatctggattcgcgttacttacattggtagtgtccacatcgatagtttcaacatctggtggaagaccaccatctagtcctttaacgctaacactaaacaaaacaaaaataacaaagtactttaaccacattttggttatttggcactacaatctggcgcacatcacatcaaaaaaagttgctacggttagtaaagttcgtactcgagtgtttgcaagaatcgctagaacgagat

SEQ ID NO: 702 - DNA, 1564 bp, Epilachna varivestis
  misc_feature (1)..(1564): RNAi target sequence ta29117.001_epiva
cttcaatggaaaaggtgaattcgtgctgatgaagactaacgtggcttcgcagaggttagaagttcaagctcgtttcgatcaaatgccacctaatgaatacggtcaagttagagccacccagctctcctccatagctgtcagaggcaattcttcgactattattgaagttagaataagaccaaaggaagccaggtggagatataaaatggatgttattgcggataagcaaagaagacttttcttcgaccgaccttcgcttaaattccaacattttccaggtctaaccgtttacactccaacatatatcctgaaccaatctgaagttattataatgttcgactcaggagctggtgtagaaattgtagaaagtttgggattcatgtcagcaagagtttacttaccatggactttcataaataaaacaatgggacttctaggaaattggagttttgacatgaccgatgatttcactttacctgatggtacaaaacgacctgtttctggtaatatcaacgacatgcaagacatttacgaaaacttcggcaagaaatggatgattgatgactcagacgatcctcaaaaaggaaaatcgctgttctttatcgaaaacggacggactgcagccttctacaacgacctaaatttcgtacctgaatacagcatgaatataaactacatactggcaaacaaaacaggtcgtattgaaatggcaaatcaatggtgttccaataaagactatcagtgtatgtacgactatgcgatgacattagataaagatatggctttttataccacaatttttaaatcgggcttgcaaaacctaagagaagcggcaagcaaaagggtaacgtcttgcggtgtgttggaaacgcccaggtttggttggaaaacgaatttcttcttcacgcctggaactaaagtcagtttcgattgtgctcaagacttcgtattgagcggtgatcctagaagggaatgcctgaagaatggagagtggaatatcccagaatttggttatactgaatgtttacgtgaagaagaatattctctgagacaggcaggaactacatttggaataatacttgcagtgatgattcctcttatacttttatttgtattctttggttacaaatatcttcagaagctgacagcgcaaaataatgagcaatatgaagagaaaatgacattggaacaacaaaaaaggttagcacaagaaagggcagctaaaaaattaaccgccgttgatgaggaccatgatgatgatgtgctttcggaaacaaatacttcatcgccaagagaaacaacagtgtattaattcgtaaatttcgattagtcatgagttaggaaaacgtagtttgccatcattcataatattttacttcaaaatttgaatgtgaaaattttttcaaaaaatttttaaatatggatatataaaattataggagtttttgtttgatgattgttaagtagaatccaatcgctctctataaatcaaaaaattcagagacagaacagctcttttagatttagaggtattttaaatgttcataatcgcattttacatttc

SEQ ID NO: 703 - DNA, 5020 bp, Leptinotarsa decemlineata
  misc_feature (1)..(5020): RNAi target sequence ta36833.0009_lepde
ataacaaattttatcttgttacagagcacacttgtgagaaggcaatcgagtaacgaacctcatacataaaagtacacgtatggtgatagaaaacaataaattatcaaactgaggctctgtgccaagttttggaaaatgtacgtcaagtggaaattggttttgactctagtactgtgtgttggtgtcgtgattggggaagatatttcaacagatataatccccttgccacaagacaatacagcagatgtggaaatagtggctacagaaactaggtcaaattcaggatctgaagctgctgtagaagagcccaccaataacactgggccttcagatactacaaacccaaattatgctgtagtgccccctgtagtttctgatagcaaacctgcaataacaaatagtgaaacaaatgacactaacaatgatgttgtaatgttgagtcctacgaaatttctcatgaaaaagggacgatctggacgtttattggaatatccgactgattacgatcctatgacttcccatattgctccaccggatagtgatcagagaggatattcaggagtaccatatgtcttgacggaaaccagactgcaacagatccgccaaaatttcatgtatccctactacaacagaggcggtaatgcagatgacgaaggagactaccagaaagaaattcagtcatctattccgcaagtgtacaagaacctcaacttccaactccctttcttcggatttcgattcaattacacgagggtctccttaaacggctatttggaattcagcgatcctcctccaaattacgactatcctttggtctttccagtcaaggaatggcctaaaaagaacgacccttctttcatcggtatctttttcagtaaatgtagaatcggtaacctgagggacggagatattgatcaaagagaccctggagtgtactttaggatggaaagggatctcagaaataggcaggacaggatgggagtggagatcagagaacgactgaaatgggatataagggaaggggtgatagggtcagaaacattcaatcccaaacatgccattatagtcacatggaaaaatatctctttcaatggaggttttggcaatgctctctaccagactaacactttccaaatgatcctcgccactgatgaagttttcacctacgccatgttcaactacttgaatcttgactggaccacccacactgaagcgggaggcgacacaagaaaaggagaaggaggagttcccgcttttgtgggattcaacgctggaaacggtactagaagttttgaatacaaaccatacagtcaagaatctgttattcgagatctcacacaaactggtttcgctaatggtttcaaaggaaggcacattttccgaatcgacgaaaatatcctaactggaacatgcaataaagatatagatggtgctaatctaccgctaatgatatctccagaaagtggaaatatgctgggtggaacaatagtgaatataacaggaccttgtttcggcctagacgaccaagttaaatgcaaatttgatgtagcaaatgaaataaatggcgtcgttatagataaaaacagggctatatgcatccaacctagactgtatgccgaaggatgggtgaatttacaaatagccataggggctggggtatacaaatggaagggaaaatattatgtcgaatcccccgcagcggcatctcaaaaaatctacttcaaggacatgaaggttcatgaaaaatcgcctagtgaaataagaataacttgggaaaaatacaacttgaccactaacgaaaacgctaacattcgtatctccttatggggttacagagaaacaacaataaggccaacgttcgtttacatcactgatatcgcagacagtctccaaaatactggagagtataccatcgtaccgtcccaatatagaacaaaagttaatgagtttctcacggatatcaaatttggtttcttgcaaattaacttgactgaatctatcaaagtgaacacttatacatctgtacaaagatcggtggaaatagttcctgttgtatggagtcgacccattcccctaggatggtactttcagttccaatgggaaaatatgtatggacgaagctggcccaaagcactctgcgatgactggctaagaacagacagatacctgaaaaactttgctcatgagttacctcaatgcccttgcactgtagaacaggctttggcagacaaagggaggtatatgcccgactttgattgcgacaaggactcaaatcccgtatgctactacaataaccaagctctgcactgtgtgaaaacaggatcaccaacgttggagggatcagaacagcagtgctgctatgacaaaaacgggtatctcatgttatcatacgatcagcagtggggttcaagtccacggcgttgccacaatctgggaaaaatgccctacaacgaagcaacaaaagttccaaccttatcgcaatggttcaacgatatggtaccgaagtatctttgctgtttgtggcaggaagaacaggcggtgggttgcgaaacgctgagattcgaaagaagaccaactcaggactgtgtcgcgtaccaagctccagggattgctgggatttacggagatccccacgtcatcactttcgatgacgtcgagtacaccttcaacgggaaaggagagtttgctcttgtgaaatctgtgacacaaactgacaacttggaggtgcaaggcagatttgagcaaatggaccctaacgcctacggagaagtacgtgcaacacaattgacttcaattgtggcaaggggaaacaacaccatagcagtggaggtcagaaggaggcccttggatgctaggtggaggtataggctggatgtcatagctgataataggaagttgttcttcgacagaccctctttgaaatttcaacatttccaaggagtgactatttatacacctacttatatcctcaatcagtctgaagtcatcattatgtttgataacggagcaggagttcaagtaatggataaccagggattcatgaccgcgagggtgtatcttccttggtcattcatcaacaaaactgttggtctctttggcaactggagtttcaataaggaagatgacttcactcttcctgatgagtcgaaggctgccgtcgtgagtaatatcaatgatatggaaagggtctacaatgactttggttccaaatggatggtggacgacgtactagatccgaaaagaggtagatccttatttttcagagaattcggcagatcatcggcaacgtacaacaacaaaactttcaaaccgcagttccttatgttacctgaggacataatacccgcaaacaggtcgatacagatacagagaacttacgacatttgtagcacaaaaatgtacgaatgcttctacgattatgccatgacgctcaacagagatcttgcccattttactcagaattataaagcaaccatatatcaactcaaagaaacgacgaggcagaaggttgtttcttgcggagttctggaaacaccgcgattcggtaggaagagtacttttctttttataccaggaaccaaagtcacttacgagtgcaatcaagacttcgtattggtgggagatcccagaagagaatgtttggcagatggcacatggaatgctcctgaatatggctacaccgaatgtttacgtcaacaagaatattctcagcgccaatcagccattgcctctggagccgttctcgcaataattattccactagttctattatttgtatatctggcttatatgttcctcaagaagaaacagaaagaacgagacgaagaaaatttacaaacgcaagcgtacgagcaacagaaaagacaagctcaggaagctgctgctagaaaattaactgctgccgaagagtacaactcagatgaagacgataataacagcaacgttacgagcacagcaaaagaaacaacagtgtattagtattagatatggtaacacttttacgatattattattttggttggcatacttctcagacaaacagtccaaattattatttgcaacaagaactatttgaatttcgaagtttcctttgaagatcccaagttgcttattatcctaaatttttgcaaaatgtcaaaatcgtactattccatcagttgtatattttatttttctgagatagttaggccaacaggtatctaaaggagtgaataacagatttttcatattttccagttttatctgattcaataatgcactatgggttttttctgttaatggtttttataacacctctgttgcaaaatacatattaggtaatataaatatacgtaattaagtcgtaattaagtattataacaaaatggcgttctctattatttaaattgtaattagatatatattttttatattcataatcacttttgcatgtaaagtaggagtccaattttctgtacttcaaccatcactatcgctacttaccccgatcactttttggatgcacatttcatgcacatttttgcacattgtttgcacagtaagttcactttgcaaacaatgtgcgaagactatgcgggaggacatgtttatgcagtaattttgtatatatgtgagtaggtatatacctactattttcatcatactctggtcctacttttcttatttacagtgataagatgatgtttgaaatcttgaattaggtacaatgaattcatttttgtcagttatttgaaacattttcggatattttaataagactgtgttttatcaaagttcagtttgattgtccaaatactagtagatcattagagtcctactgtagttttagcattttaataaagtaattcaatattaatatacaagtaatcttgcacttctgctaactcaaaattttgcaaaattattcactcgaatcagtattcacacgtttctctttcagaaataaccaaaatatttcaccccatacacaaatttcattaggtttagtgaaatttgtgtatggggtgaaatattttggtta

SEQ ID NO: 704 - DNA, 3724 bp, Orius insidiosus
  misc_feature (1)..(3724): RNAi target sequence ta02139.06_oriin
tttttaacgttaataaaacagttttttaatataaaaaaagtgtacaaaagtttagtatatgtcggtttctacgctatcggcgcgacgcatttgagatttgggggagtcgaacgagctgtcggttccgtcttcgaagtcgatgtcggggcggttcggaaggggctcgtgtgtattgtaaacggcgtcgaaattgctcggattcctaacgagtttatcctcttctttaccccggccagataaggaagaacgcctcctgctgtacttccagctttggaccccgttctgaagacgggctgagtgacggcgataaaaccacgtcgcgatacagaccagtgtgaggaccaacggcaaaagaatgcccaaaatcataagcgacatattcgccagttgttgcctgtcgtattcgacatacctgagacattcggtgaacccttcatccccttcgatccatttcccttgagcggagcacttcctttgttgatctccaacaaaatgaaaccttgatcgcattcgaaaataactttggtatcaggaacgaagaagaagttacttttccttccaaatcttggcgtttcaagaactccacagctcaatgttctcattttgttggtctgcttgatggatgaatattcgctgaagtagtccaaagtctgtttcgccatttcacgattgaggctcaccgcgtaatcgtatttacattgatacgagtcgccgcagaggtcttcagccttagagacgtcctgtgtccgattcggtggtatgatttcctgaggagtttttttccattctggtacaaaagtacgattcgcatagtacgatgctgaacggccatactcccttatgaagaggggctccccttttttcggatctgctctatcttccagcaaccatttgagagcaaaatctttgtgtattcgttcgaaatcttcaaggtctccgacttggacgatttgtccgtcaggagtggtgaagtcatcggaaatgtcgaagctccaatttcccatcaaacctcgcgtttgattgatcatcatccagggcaagtagacacgacaggccatgtatcctttgttctcaactacctcaactcctactccggtttcgaacataatcacgatctgcgattggtccaaaacctgagatggcaaatagacggtgacgcctcggaagtgctgaacacgaagtgcaggacggtcgaaaaagactcgacgtttgttggcgaaaacgtccaatctgtatcgccattgggcgtatcttggtcgcaagcggacttcgatgatcgccgaattatttcctctagctgcaacagatgtcagtaaagtggcagcagtgtctccgtagatattcggcccgacctgttcgaatctcccttgtacgtcaagtttgtatttatctgttgaagaatggagcaaaacgaattcgcctttaccgttgaaagtgtattcaagctcgtcgaatgtgacaatgtgaggatcgccgaagacggtagcgacgtaaggcgcttggtatcctacgcagtcttgactgggtcgccgttcgaaacgtaatgtctcgcatccgacagcttgctcagactgccataaacaacagtggtagaatgggcttatatcatgccaccactgcgataatgttggaactttgttcggctcagtccacggtaaaagacccaaatttgatgatctcttcggcgaagacccccatttctggtcgtacgacaacatcaaatattcgtttttgtcataacagcattgttgttctgctccttccaaattcggagcaccagttttgacgcaatgacgtgcacctttgtggtaaaaacagttcggattcgcgaccatatcgcaatctggatcgggcaaaaaacgccctttgtcgtttaacgcttgctgtaacgtgcacgggcattgggccaactcgttagcgaaattcttcaaaaatctatcgttcataagccactggtcgcatttcgcttctgcccactttttcccgtagagtctctcccattgcggagcgaagtaccatccgagaggtatcggcttactccatattacgggggttatgctaagtccttgatattgggtcgggtttgtcaagttgatttgaatgaagccgaaagtgagctcggacaattcatagttgttccttgtccggaaattggccggttgtatgacgtagctgcctgtgtttgccacacctgattctaacgtgtcaacgtaaagaagtttcggtgctatattcgtctctttgtacgcccaaatcgaaatctgcaaaggagccgcagaattggaagttaaattgtatttgttccacgttattttgatttctccaggataagcatcattcacacttccataatgatcgttctcagcaaaagagatcctttgcgtcgccgtcgctggagtttcgacaaagtatagtcctttccaaatatatttgtcgtcgtttaacgagatttcgaagggtatgtaaccttcagccatgatgaaaggctgaacgcatatcgcccggttggtgtcgaccactgttcctaaagtcggcgtcgtatcaaacctgcatattatcttcatttctttggtaaaacaaggtccggtgatgttcacaatagtcccgcccaacatgtttccagattcaggtgcgaaattaaggtccaaacttgctgcggctatatccttgttgcaagatcccggaagaatgttttcgtcaatacggaatatgtgacgtccaggaaatccgttagcccaaccacgccccgttaaatctcgaatcgtacttgcctgcgaataaggtttatattgataagtccgagtcccgtttccagcattgaatccaacaaacgcaggagtacctccttcacctccagtggtatcaccatttgcttcagtgtgcgttgtccattgtatgtccgcatagttgaacatcgcatatgtgatgacttcatcagtagccaatacaagttggaatgtattcgttttgtagagactgatgtcgattcctccggcaaaagatacgtttttccaggtgatgatgactgcgtgttttggaacgaatgagtcagaaccgatgacgccctgacggatgtcccacataagacgttctctaacttcaaccccgaaacggtcagtccttccttgtaaatctctttccattctgaagtagacaccaggaggtctttgatccacatctgtatctttgatgagaccgatacggcatttggaatagaaaataccgataaaactcggatcgttctttttgggccactcgaccgtcgggaaatgaagggggtaactgtactgttctggagggtccgaaaactcgagataaccgtttaagcttacgcgtgtgtagttgaagcggaaaccgaaaaagggaagttggaaattgaagtttttatggatttgggtagaggaaggatgaatgtctttttgtaggtcaccggaatcatttggaccacctttatcgaagaaccaataaaggaagttggaacggattttccgtaaacggtcttcagttatcacgtacgggagttccccaggccctgcacgttgcgttggaggtgccgtcctttcatcatcaaaatcgtatggatttctcgggttgtaggggttgtaaggagtcaaaaccctcgaaggctgcctgtagttgttgctcctcacgttgataacttcattgaaccccgggcgcacactttgtcctctttggccttccgaacttttcaaaaagtaaaaaa

SEQ ID NO: 705 - DNA, 3845 bp, Coleomegilla maculata
  misc_feature (1)..(3845): RNAi target sequence ta22533.0010_vibdu
caaatttcaaaatagaaatgaatctaaaagattagcaaatccgatcattagtgatgtacaatactgatgaacggaacattttaacatggtgaaaattcgaatattagttactttttgtatattcaaatttgttctgggtgaaggaagtgtcagttctaatgatgtggaaagcattgttggtgtgcctatgaaaaaagaagtacttggagctataggagaggataatactgatacattccccaatgtaaatggagccggtcctgataataattacgcatccgccccgattcctggagcttctgttactttccataggccttcagggaaatatataaccaactatgataacaattacgatccaatgcgctcgaatgttgcgcccccatccgtagatcagaggggtggttccggcttaccttactacataactgaagataggctgaaagaaatacgttctctgtttatgtatccatactataataagggtggaggtggtgacaacgatggagattatcagaaacaaatccaagcctctacttcaatcgtacacaagaacctgaattttcagcttcccttcttcgggttcaggtacaattacactagagtttcactcaacgggtatttggaattcagcgatccaccaccaacctatggcaaatatccactcatctttcctagtcctggatggccggaggtgaatgatccagctttcatcggaattttttatagcaaatgtcgtatgggtcttctaagggctgaagatatagatcagaggaatcctggagtgtatttcaggcttgagcgggatttgaggagcagaaccgaccagatgggtgtcgaaataagagaaaggaccaaatgggacatcagggaaggtgtgataggaactgacagtttcgatcctaagcatgcaattattataacttggaaaaatgtttctttcgctgggggtatatctgacagtttgatgaggaccaacactttccaaatggtgctcgtgacagatgaagttttcacttatgccattttcaactacctccacctaggctggaccactcatacggaagcaagaggtgatacgactacaggagaaggaggtactccagcatttgttggattcaatggaggaaatggcactagaagttttgaatacaaaccatacagtcaagattcagtaatacgagatcttacatcaactggtttcgccaatggttttccaggaaggcacatattcagaatagatgaaaacattttactaggaacttgtaataaggatatagatgccggtcggttagatctcatgtttgctccagaaagtggaaacatgttaggaggaactgttgttaacataactggtccttgcttcaaaccgaatcaaaaaatcacctgcatctttgatattgctccgccagttattggcgttattgttgatagaaatagagccatttgtatacaacctccgctaatggctgaaggttgggttaggttcgagattgcagtgggaaacgagaggtttaaatggaaaggaagatattttgtcgaaacacccacaatggcagcgcaaaagatattcttttcagacatgacgtatcatgacaaatctcctgcggaaattcggatatcatgggaaaataagaacttaacatctaacgtaaatgcgaatataagaatttcactatggggttatagagaaacactcgtatctccccaattcgtttatataacccaattggcgacgaacatacaaaacaccggagaatacgtgattgtcccatctcaatacagattgaatgaaaacaagtttcaacaagatataactgtcggtttcatccagatcaacctgactgattcgatacctgttggtaacagtagcgtgaaaataacaccgctcatatggagcagacccattcctttggcgtggtactttggtccacaatggcagaggttatatggaaacagctggccttcagttctttgtgataattggatcaaggatgatcgttatctgagtaatttcgctcatgaattacctcaatgtccttgtactttacaacaagctttagttgataaaggaaggtacatgcctgggttcgattgtgacagagactcgaacccattatgctactaccaagacaatgccatacattgtgttcgatcaggtttaccaacgaatgaaggaggggaacagcaatgctgctacgataaaaataatttccttatgctgtcttatgaccaaataggaggctcaaatccgagacgttctcacaatttaggtttcaacccttacacagaatctacaaaagtacccggtttgtcacagtggtaccacgacatgatcccgaagtttgtctgttgtcgctggcaagacaaccaagcagtcggttgtgaaaccttcaggtttgaaagacgaccaactcaagattgtacagcttaccaaggacctgccgtggctggggtatacggagatccccatgtaatcacgtttgatggattggagtacacattcaacggaaagggccagttcgttcttgtgaaaaccaacgttgcctcgcaaaggttagaggttcaagcaaggttcgagcagatgcaaccaaatcaattcaatgaggttagagccactcagttgacgtctatagccattagagggaatgcttcaactatcattgaagttagaataagaccaaaacatgcaaggtggaggtatcggatggatgttatagccaacaaggagaagagactattttttgacagaccttcattgaagttccaacatttctcaggattgacggtttacaccccaacatacatactgaaccagtcggaagtgattgtaatgcttgattctggagcaggtgtggaaatagtcgaaagtttagggtacatgagtgcaagagttttccttccatggtcgtttattaataaaactgtcggtctctttggaaactggagttttgatataacagatgatttcactcttccagatggaacgaaaaaacctatcatcaccaacataaatgactgcaaagtgtttatgacaactttggaaaactgtggatgatagacgactccgaagattcgcaaacaggacaatctcttttcgttaacgaatttggacgtactgctgcatactataacgacctcgactttgtaccagaattccgaatgaacattagagatctgctaataccaaccaacgcatcggattattatatacagcaggcatacaaagcatgcaccaacaaagactaccaatgcttgtatgattacgcaatgacattggacaaagactgcgcattctatacaacaatattcaaatcaggtttgaaaaatataagagaagctagcggtgaacagactgtatcatgcggtgttctggaaaccccaaggttcggttggaaatcgaatttttcttcactcctggaagtaaagttagtttcgaatgcgctcaagatttcgttcttgacggggatcctagaagagaatgcatggaaaatggacaatggaacctacccgaattcggattcacggaatgtttacgtcaagaagaatattcgttgagacaagcaggaactacatatggaataatcctggcagtgatgattcctcttattcttctactagttttctttggattcagatttatgcgtaaactatctgaacaaaatgaccagaccaatcaagaaaaactgactatggagcaacagaaaaggttggcacaggagagggcagcgaaaaaattaacagatgtcgatgatgagcataatgatctattttcagaacattctcaatgttatcagcaatatcaatggttttctacatgaatatatcttcaaatgtgtgaaaaa

SEQ ID NO: 706 - DNA, 982 bp, Diabrotica undecimpunctata
  misc_feature (1)..(982): RNAi target sequence ta01950.01_diaun
tgaaaaagcaaatcactacgacttgccggattttgtagtagtgttaattttgtattagaaaatcaaaatgagttctattggaactgggtacgatttgtcagcttcccaattctctcctgatggaagagtttttcaagttgaatatgcaatgaaagcagttgaaaatagtggcactgtaataggtctccgaggtacagatggaattgtattagctgctgaaaagcttattatgtcaaaattacatgaacccagtacaaacaaacgaattttcaacattgataaacatataggaatggcattttcaggtttaatagctgatgcaaggcaaatagttgagattgctagaaaagaagcatcaaattataggcaccaatatggatcaaatattcctcttaaatacctaaatgatagagtaagcatgtacatgcatgcatacactttatacagtgctgtcagaccatttggttgcagtgtcatattgtccagttatgaagataatgacccatctatgtttttgattgatccatctggagttagctatggatactttggatgtgctacaggaaaagctaaacagtctgcaaagactgaaatagaaaaattgaagatggggaatttaacatgcaaagaacttgttaaagaagcagccaaaataatttatttggtccatgatgaattgaaggataagaattttgaactggaactttcatgggtatgcaaagatacaaatggtttacataccaaagtgcctgagtcagtgtttgctgatgcagaaaaggctgctaagcaagcaatggaagcagattcagaatcagatacagaagatatgtaataactacatttagtttttaatatttcactgatggtggctgttcttacaatattcgtgtgttatgtctataaattatgtaatactgtgagaatttccatttcaatgataggtttataactttttttctaataaatacataattttaaaaaa

SEQ ID NO: 707 - DNA, 795 bp, Diabrotica barberi
  misc_feature (1)..(795): RNAi target sequence ta01738.01_diab
tgacactgcaaccaaatggtctaacagcaccgtaataggccttcgaggtacagacggcattgtattggctgctgaaaagctcattatgtcaaaattgcatgaaccaagtacaaataaacgaattttcaacattgataaacacataggaatggcattttcaggcttaatagctgatgcaaggcaaattgttgagattgctagaaaagaagcatcaaattatagacaccaatatggatcaaatattcctcttaaatacctaaatgatagagtaagcatgtacatgcatgcatacactttatacagtgctgttagaccatttggttgcagtgtcatcttggccagttatgaagatagtgacccatctatgtatctgattgatccgtctggagttagctatggatactttggatgtgctacaggtaaagcaaaacagtctgcaaagactgaaatagaaaaattgaagatggggaatctaacttgcaaagaacttgttaaagaagcagccaaaatcatttatttggtccatgatgagctaaaggataagaattttgaactggaactttcatgggtatgcaaagatacgaatggtttacataccaaagtgcctgaatcagtgtttgctgatgcagaaaaagctgccaaacaagcaatggaagcagattcagaatcagatacagaagatatgtaataactagatacatttagtttttaatatttcgctgatgtggctgttcttacaatatttcatgtgttatgtccatatattatgtaatactgtgagaatttccatttcaa

SEQ ID NO: 708 - DNA, 993 bp, Epilachna varivestis
  misc_feature (1)..(993): RNAi target sequence ta26097.001_epiva
atttgtatatttataatcatagataatatataatatatttaggttttcaatcaagtaataccaaattattaatataaaatgagttctatcggcactggctatgatctttcggcttctcaattttctcctgatggtagagtttttcaagtcgaatatgctatgaaagctgtggaaaatagtggaacagttataggtcttaaaggaactgatggggtagtacttgcagcagaaaaattaatcatgtctaaactacatgaatctggcaccaacaaaagaatttataatatagatacacatattggaatgtgtttttctggtcttattgctgatgctaggcaattagttgatatagcgagaaaggaggcatcaaattatagatcacagtatggtgtaagcattccactcaaatatcttaatgacagagtcagcatgtatatgcacgcatatacactttacagtgctgtaagaccctacggctgtagcattattcttgctagttatgaggaagatcagcctatgatgtatttaattgacccctcaggtgtaaactatggatttaatggttgtgctactggaaaagcaaagcaatctgctaaaacagagattgaaaaactgaaattgggtgagctgagttgcaaagagttggttagagaagctgccaaaattatttacttagtccatgatgagttgaaggataaaaattttgagcttgagttatcatgggtgggaaaagatagcaatggtagacatgaaaaagttcccagccacgttttagctgatgctgagaaagcagcaaaacaagcaatggaggcagattccgattctgatactgaggatttgtagatatacatttgattattttataagtgcagttctaataaagcgtaatttctttcaatgtgtcatcttaaataacgccctttttcttgtaattaacgtcaaagaaaaaactcattacaaacaatttgttctgtaccataatgtgttcattgg

SEQ ID NO: 709 - DNA, 936 bp, Leptinotarsa decemlineata
  misc_feature (1)..(936): RNAi target sequence ta37784.0003_lepde
caactatttgagtatttgacagatgagttgtattttaagaaagaagcaaatcacgctagttcaaaactccaaaactaaatttttaaaatcgaatttaaacagtcaatatgagttcaataggaactgggtatgacttgtcggcttcgcaattctcacctgacggaagagtcttccaagtcgaatacgccatgaaagccgtagaaaacagtgggaccatcattggcctcaagggcactgacggaatcgtcctggcagccgagaagctcatcatgtctaaactgcatgaaccgggaacgaacaggagaatcttcaatatcgatagacatattggaatggcgttctctggcctgatagcggatgctcggcagatcgtcgaaatcgctaggaaagaggcagctaattataggctccagtacggcattaacatacctctgaagtacttgaacgacagagtgagcatgtacatgcatgcatataccttgtacagtgccgttcggccttacggatgcagcgttatattagctagttacgatgaggatgagcctcagatgtacctaattgatccatcaggagttagctatgggtttcacggctgcgcaacagggaaagcgaaacagtcggccaaaaccgaaatagagaagctcaaactaggcaatttgacatgtaaagaattggtgaaagaagcagcaaaaataatatacatggtccatgacgaactcaaagacaaaaactttgaaatggagctttcttggatatgtaaagaaagcaatgggttacacgtgaaagttcctgaatccgtatatttggaggcagaacgggccgccaagcaagccatggaagctgattcggaatcggataacgaggacatgtgaggctttgtcagttagtattaagattatggcttagttgtaagatgtcttggctaaatcttttttt

SEQ ID NO: 710 - DNA, 927 bp, Orius insidiosus
  misc_feature (1)..(927): RNAi target sequence ta09672.01_oriin
aggtaacattacatttgaggccgcatattttgctttatcattactttaaatttaattttacttttatttcttgttaaaacgtttgtttgacatcaaaaatgagttccatcggtaccgggtatgatttgtcggcgtcacaattttcgcccgacggacgagtctttcaagtagaatacgctcagaaagccattgaaaacagtgggacggtaatcggcctgagaggtaaagatggtgttgtcttggctgtcgaaaagcttgtcacgtcgaaactgtatgaaccaggagccaataaaaggatattcactattgacaaacatatcggaatggctgttgctggcttgatatctgatgcgaggcaggtggcggaagtcgctaggaccgaagctgctaattatcgctcccaatacggaagtaacatcccgttgaagtatttgaacgagcgagtctccggttatatgcatgcatatactttatacagcgctgtccgacctttcggctgcagcgtcatcctcagcacttacaacgagcgagatggacccgaaatgtacatgattgacccatcaggtgtctcatacggttatttcggatgcgctgtcggcaaagcgaaacaagccgccaaaaccgaaatcgaaaaattaaaattgaaagatttaacatgcaaagaattagtcaaagaagctgccagaataatttatttggtccatgatgagcttaaagataaacagtttgaacttgaaatgagctggatcggcgctcatacaaacggtgtaaaccaagttgtcccgccgaccgtccacgccgaagctgaaaaagatgcgaaagctgctatggaagaagattcagattctgaaactgaagatatttaacttaattatactatgttctaattaacttttttccattaataactttttttttctattcaaa

SEQ ID NO: 711 - DNA, 1115 bp, Coleomegilla maculata
  misc_feature (1)..(1115): RNAi target sequence ta36121.0001_vibdu
caatgagttgtggatttcagatttgaaggatcatataaaattgtttgcttgaaacataaattacaatttcattctaatttaataaaggaaaaatgagttcaataggcactggttatgatctttctgcgtcacaattctcgccggatggtagagtttttcaagtggaatacgctatgaaagctgttgaaaacagcggaacagtaataggtcttaaaggtacagatggaattgtcctagcagcagagaaattaattacctctaaattacatgaaccaggaacaaataagaggatattcaatatagatacgcatattggaatgtgtttttcgggtttgatagctgatgctaggcaactggtggatatagctagaaaagaagcggctaactatagatcacaatatggtgtgagcattccactgaaataccttaacgatagagtgagcatgtacatgcatgcttacactctatatagtgctatcagaccttatggttgtagtgtaattctagcaagctatgaagaaaatcaaccatttatgtatttgattgatccttctggagttagctatggttacaatgggtgtgctacaggtaaagcgaaacagtcagcaaagaccgaaattgaaaagttaaagttgggcgaattgagctgcaaggaattagttagagaagcggctaaaattatttaccaagtacatgatgaattgaaagataagaattttgaacttgaattatcatgggtaggaaaggatagtaatggtagacatgaaagagtaccaagtcatatttatgctgatgccgaaaaagctgctaaacaagcaatggaagcagattcagattctgatacagaggatttataagttttaactttattatttaagttcactcagaaattaataaatgttttgacttacattttttttaagacattatgttatagccacattttctctatccatttatatcatttatatcaacaattctttaaaactgaaggaccgaaattttagttaacaatactcgataaaatatgaaataatttcaaagcaattgaaagattggttaatataggttgaaatgttttagaggctgcaacagtgatttgtagaattttgcaa

SEQ ID NO: 712 - DNA, 853 bp, Diabrotica undecimpunctata
  misc_feature (1)..(853): RNAi target sequence ta07256.01_diaun
cattattgtaccgtgttgtctagcggatattttagatttaacaatcttattttataaaataattagttaaaatgatgcaaaccgccaataatgtatattatcccgattattccactgctccaatgcaacgtcaaattaatccttatgccgacaatggagggagtgtagtagcaatagcaggtgaagactttgtaataattggtgcagatacacgtttgagtgctggattttccatttacactagagaacaaaacaaactattcccgctatcaggcactacagttttaggctgtgcaggatgttggtgtgatactctaacattaaccagaatccttaaatctcgcatgcagatgtaccaacaagagcataacaaaacaatgtctacaactgcatgtgcccaaatgttgtcaaccatgctctactacaagagattctttccttattatatatcaaacattcttgttggtttagataatgaaggaaagggctgtgtttacagctatgatccaatcggacattgtgaaaaagctacttatagagcaggtggttcggctggagctctgctccaaccccttttggacaatcagattggacaaaagaacatgcttaaaacatctggagaacctcttagtcaggagaaagctttggctacactgaaagatgtatttatttctgctgctgaaagagatatctacactggagatagtgtacttataaatattattactaaagatggagtaaaggaagagtccttccagttgagaagggattagaagcaagtgtttttgtttatattattttcttatgtgtaattcaaatatactttctaaataaacaattttaagataaaaaa

SEQ ID NO: 713 - DNA, 856 bp, Diabrotica barberi
  misc_feature (1)..(856): RNAi target sequence ta07284.01_diab
gcataggggttaatttgacgttgcattggaccagcggattttagattcaacaagcttattttataaaataattagttaaaatgatgcaaacagctaataatgcatattatcccgattattccactgctccaatgcaacgtcaaattaacccctatgcagataatggagggagtgtagtagcaatcgcaggtgaagactttgtaataattggtgcagatacacgtttgagtactggattttccatctataccagagaacaaaacaaacttttcccactatcaggcactacagttttgggttgcgcaggatgttggtgtgacactctaacattaaccagaatccttaaatctcgcatgcagatgtaccaacaagagcataacaaaacaatgtctacaactgcatgtgcccagatgttgtctaccatgctctactacaagagattctttccttattatatatcaaacattctagtaggtttagataatgaaggaaagggctgtgtttacagctatgatcctattggacattgtgaaaaagctacgtatagagcaggtggttcagctggagctcttcttcagcctctgttggacaatcaaattggacagaagaacatgcttaaaacatctggagaacctcttagtcaggagaaagctttgtctacccttaaagatgtatttatttctgctgctgaaagagacatctacactggagatagcgtacttataaatattattactaaagatggagtaaaggaagagtccttccagttgagacgggattagaagcaagtggttttgtttatattttcttatgtgtaattcaaattaatatactttctaaataaacaattttaagt

SEQ ID NO: 714 - DNA, 796 bp, Epilachna varivestis
  misc_feature (1)..(796): RNAi target sequence ta27792.001_epiva
agtgagtttgttgttctagtagagtaaataccgaataaaaatgcattcaataatgaatgattctcgtccatttttcgaagattattctgttaagccaatgcagcgtcaattcagcccctacgctgataatggagggagcattattgcaatttctggtaacgacttcgtggtgattggtgcagatactcgtttgagttctggattttcgatatacactcgggatcaaaataagttattcaaactctcagataatacagttttgggatgttctggatgttggtgtgatactctttctttaactcgtattttgaacgcacgtatgcaaatgtatgaacaagaacacaataagaaaatgtccactccagcttgtgctcaaatgttatcgaccatgttatattacaagcgattctttccgtattacatttctaacatattagttggtttggattctgagggaaaaggatgtgtttatagttacgatcctattggtcatactgaaagatctagttatagagctggaggatcagcaggtgccttactacaacccctcttagataatcaagttggtatgaaaaatatccagaatgcacataatgaaccactaactattgaaagagctgttggaattttaaaggatacatttatatctgcagctgaaagagatatttatacaggtgatagcattaagatcaatgtcatcactaaagatggcatcaaagaagatacttttgagttgaggaaagattaaattgtatactttttaatatcttcaataaaaatttaattataaaaaaaa

SEQ ID NO: 715 - DNA, 842 bp, Leptinotarsa decemlineata
  misc_feature (1)..(842): RNAi target sequence ta37916.0001_lepde
tttttttatattttcggcttgtcattctagttgacttgtttaaaagtagaaagtatttgtgtttcctccactataaaatgcaaacagcaatgaacgcttattatcctgattattcaacggtaccggttcagcagtctttcagcccctatgctgataatggagggagcgtagtggccatagctggagatgatttcgtggtagtgggagcagatacacgtctaagcgccggcttctccatctacactagagaccaaaataagttgtttcctctttcaaaaacaacggttctcggatgctcaggttgctggtgtgacacgctaacgttaactcgtattttgaagtctcgcatgcagatgtacgagcaggagcataataaagtaatgtcgaccactgcttgcgcgcagatgctctccaccatgctctactacaaacgcttttttccttattacatctctaatgttctcgtgggtctcgacaacgaaggaaaaggttgtgtttacagctacgaccctattggacattgtgaaaagactacgtacagagctggtggttctgctggggctctgctccagcctctgttggataatcaaatcggacagaagaatatggagatagtgtctaccgagcccttgtcgaaagagagagctctggctatattgaaggatgtcttcatctctgcagccgagagagacatatacaccggagatagtgtttctatcaatatcataactaaggatggtgtgaaagaggaatcatttgaattgaggaaagattagaggaattttatattgaattttccttcatgaatttttgattatatgatttaagtaaaaaaaaaagtc

SEQ ID NO: 716 - DNA, 755 bp, Orius insidiosus
  misc_feature (1)..(755): RNAi target sequence ta09310.01_oriin
cgcttccgatactcgtttgagccaaagcgaaaaatttttgtttggtcatctgctgtacggtattagctgaagaaatgtctttttcaccgtattctgataatggagggagcatcgttgctgtcgccggtgacgattattcgatcatcgcttccgatactcgtttgagcgctgggtattcgatttatacgcgtgagcagtcgaaattgttcccgctgtcggaaaaagcgattttgggaagcgctggatgttggtgtgacgttctttctcttgctagattgctccagacgcgcattaaaatgtacttgtatgagcataataaggcgatgtcaactccagctatagcgcagatgctatctatcataatgtactataaacgattctttccgtattacacgtcgacaattttggccggattagattccgagggtaaaggaatcgtctacagctacgacccaatcggtcatatggaaagctctaaatatcgtgctgcaggttctgcaggagcacttctccagcctcttcttgacagccagctgggcaagaaaaaccaggagaatgtcgtgaataaatcgtacagcttggaagaagctttggcgatcgtgaaggacacttttatttcggctgctgaaagagatatttatactggagacagcatcgctttagccatcatcactcaagatggcgtcaaaaacgagactttccaactgaggaaagattaaaaacatattatttgtactatttttgctctttttgaa

SEQ ID NO: 717 - DNA, 813 bp, Coleomegilla maculata
  misc_feature (1)..(813): RNAi target sequence ta23917.0001_vibdu
gaaaatgtctataatgaatgattctcgtcctattttcactgattattctcaaaaacctatgcagcgacaatttagtccctatgccgataacggagggagcatcattgctatagctggagacgattttgttgttatcggagcagatactcgcttgagtgctggttattccatatacacccgcgatcaaaataaactctttaaattgtctaacacaacagtattgggttgttctggttgttggtgtgatactcttactctaacaaggattctgaatgcccgtatgcaaatgtatgaacaagagcataataagattatgtctactcctgcttgtgctcaaatgctttcaaccatgctatattataaacgattctttccttactatatatccaatatattggcaggcttggactctgacggaaaaggctgcgtatacagttatgatccaataggtcatacagaacgctctgcttatagagctggtggatccgcaggtgttctactgcaacctcttttagacaaccaaattggccttaaaaatatggttaatactccgaatttgcctctgaccattgaaagagctgttggaattttaaaagacacattcatctctgctgcagaaagagatatacacactggtgatagcatcaaaattaacataataactaaagatggaattaaggaagacacttttgaattgagaaaagattaaacatttttattttttgtcaacaatgggtaaaaattatctaattttgaggatgttattgtgagtgtctctcaagtatttaattataactccgaaatataaaaaaa

SEQ ID NO: 718 - DNA, 785 bp, Diabrotica undecimpunctata
  misc_feature (1)..(785): RNAi target sequence ta08127.01_diaun
tttttttagtgcaaaacttattttttttattttaatatataccaaaacataccaaagcttaaaaaataattaattaaccttcataaaatttgggcaattcatttcctaaaataactcttcgttcaataccagcttcattgataattcccagtctgactacacctcctgaagaaccatctctggacatagcaagtgccaatgtatttgtgacaaacttcacacattcttctttgctcatattgggtttgaaattggcatctacataaccataaacataactggaacctgatcctcctattgacacttcttgcctcacacacatcccaccaattggtatggaatagacttgaccgcctttcttcttatcccaacctgctaccagtattccagccattagtgaatctctataattgtagcaaagttcttggaaaatggcagcacctacttctactttgggttcttcaccaagttccataccatgaaaattaagatgataagcaacaatgtctgcaattgcttgtgtatctgctgcagatccggaacgacaacagtagatatggtcagtgactttggtgagtttgtctgctacacggtttgctatgtaagccccagtagttgtgcgagaatctgctcctataacaacgccgccgtcaaactctgcggccataatagaggtgcctgtactgtgagcagcatctctccaatcatcaggaccagtcattgcaccaaactcattcataagaggcatttttataagtttaatttcaagaatacaagctgagaaa

SEQ ID NO: 719 - DNA, 842 bp, Diabrotica barberi
  misc_feature (1)..(842): RNAi target sequence ta05581.01_diab
tttttggtgtaaacctgatttttttattttaatatataccaaaacataccaaagcttaaaaaataattaattaaccttcataaaatttgggcaattcatttcctaaaacaactcttcgttcaataccagcttcagtgatgatccccagtctgactacacctcctgaagaaccatctcttgacatggcaagtgccaatgtatttgtgacaaacttcacacattcctctttgctcatgttgggcttgaagttggcatctacgtaaccataaacataactggagcctgatcctccaattgacacttcttgtctcacacacatcccaccaattggtatggaatagacttgtccgcctttctttttatcccaacctgctaccagtataccagccattagtgaatctctataattgtagcaaagttcttggaaaatggcggcacctacttgtactttgggttcttcaccaagttccataccatgaaaattaagatgataagcaacaatgtctgcaattgcttgtgtatctgctgcagatcctgaacgacaacagtatatatggtcagtgactttggtgagtttgtctgctacccggtttgcaatgtaagccccggtagttgtgcgagaatctgctcctataacaacgcctccatcaaactctgcggccataatagaggttcctgtactgtgagcggcatctctccaatcattaggagcagtcattgcaccatactcagtcataagaggcattttttacaagtttaatgaaaagaatacaagcttagaaaaattacttgtaatcctacaatccaatattttgccagtcaccagctcctataacaacgcc

SEQ ID NO: 720 - DNA, 935 bp, Epilachna varivestis
  misc_feature (1)..(935): RNAi target sequence ta23856.001_epiva
cgatcttaaaaatcggatttatatcgtgattattgtaataattattctcacagctagccgaataatttcgtttcgcgttactggtaacactgaaaatgcatttttcattttgtggttatgattatttggagaaaaataatttgtcatagtcattgagtacaaattgtgttcgatatatttgcaatattagattcattaaacttgattttatactgaaaatcacaaactaccatcgaaaacatggactccgattggatgaatgcaccacacagtacagggacttctattatggctgctgagtttaatggtggagttgttattggtgccgacactagaacaactacaggggcatacatagccaaccgagtaacggataaactaacaaaagtaacagatcacatttattgttgtcgttctggttcagcagcagatactcaagctattgctgatatagtttcttatcatctaggatttcatggaattgagttgggagaagagccacttgtagaaacaagtgcagctgtgtttcaagaactttgttacagctatcgtgattctttaatggctggaattctagtagcaggttgggataaacgtaaaggtggtcaggtttattctattcctataggtggaatgtgtgtaagacagagcgtatccataggtggttcaggatcaagctatgtttatggttatgttgatgccaattataaacctggaatgtcaaaagaagcttgtgtagactttgtttcaaaaactttggcacttgcaatgtcaagagatggttcttctggtggttgtattcgtattggagtcattacaaaggatggcattgaacgcaaggttattctgggttctgaggtccctaaattctatgaagattgattttatttgtattcaattaaataataaataaaaatgttaacatctaaaaaaaa

SEQ ID NO: 721 - DNA, 1264 bp, Leptinotarsa decemlineata
  misc_feature (1)..(1264): RNAi target sequence ta33564.0001_lepde
tttacataattacggaatactgtgccatagattacagaaatttaaattttagtgttctgtggttctaacctagcaaataatttgtagagtcattttttgacttattttttgttagtgattttgtattcagattgtctccgttcgtaaaaatgctactgaatcaaatatccatagcaggtgccgatgactggagaaatgccgctcatagcactgggacttctattatggcagcagaattcgatggaggagtaattattggtgctgattcccgtacaactacaggggcgtacattgcaaatcgtgtaactgacaaactaactaaagtaactgaccatatatattgttgtcgatctggatcagcagcagatactcaagccattgctgatattgtatcgtaccatctgaacttccatggtatggaactaggagaagagccccttgtagaggtgggggctgctatcttcagggagctttgctacaactatagggattctctcatggcgggaatcctagttgctggctgggacaaaaaaaaggggggacaaatttattctattcctatcggagggatgtgtgttaggcaagcggtttctattggaggttcaggttccagttatgtttatggttatgtagatgctaatttcaaacccaagatgtcaaaggaggaatgtgcgaaatttgtcacaaatactctggctcttgcaatgtctagagatggatcatctggaggtgttatccgtctaggtataattacggagtcgggaattgaacgtcgtgtcatcttaggcgatgatctacccaagttctatgaaggatagagcatataataatcataatttttcattttgtaattggtgtcaataaatcaaataaaataaggttttctttaaaaaacaattatatgattataaaatacatgttaatgaacaatgaatttgaaagagaaaaaagatggttgtgtaccatgaaggcactaattcgtatctttattaatgtagtctgtatttttagagagaatcgtgacaaaattagtcgcatggcgccatttggcaccaacatattttgaattcctttattttttctggaactctggtaataaaattatttctgttatatcttagtattcaaaatgccactgaaaaaattgaatcattattttcttaccaattctttttcttaagaagatatcgttacagcactaccatcaccacaaacagatttaccattttttttgtcaaccttctaaattttacagtaaatgtat

SEQ ID NO: 722 - DNA, 912 bp, Orius insidiosus
  misc_feature (1)..(912): RNAi target sequence ta09100.01_oriin
ttcagaattagctatttaaccgaaggcgactcagcgaatttactaagtgaaggtgaactattctgtggagaaaaatggccaaagtcgctgttcatcatgatcgtttcggtgcccctgcaatgactgaggaaccagtttctactggaactacaattatggcttgtacttttgacggaggcgtcatcatcggtgcggattctaggacgagtagcggaccttacgtcgccaatcgcgtttccgacaaactgacaaaaatctccgatcacatttactgttgtaggtcaggatcggccgctgacactcaagctatcgctgatatcgtcaaatatcacctttctttttttaagcttgaaactggtgaagaaccgcttgttgcaactgctgcagcgattttccgtgagctttgttataactacagaaatcgcttgatggctggcatcatcgtcgctggatgggacagagttaaaggcggacaggtttatacgatacctttgggtggtatgataatcgagcagaaattcgcaatgggcggttctggaagttcttatgtttatggcttcactgatgccaactatagagaaaacatgagttcagaagaatgcaaacagttcattaaacaagcaatcgctcttgccattcgtcgtgacggctcttccggaggtgtcataagaatgggtctcatcacaaaagatggtattaaacgagaaattttttcgggtaaagattacccttcatatttaactccagctaaagattagaatatctttttgtattccttgagctgtaaaatttaagtacattcatttataactttttgaaatgattttctttcatttattaacaaaataatccagtactaataatactccagcaagtactatttcaatacacatctttatcacaaaggcaaaa

SEQ ID NO: 723 - DNA, 686 bp, Coleomegilla maculata
cctcacagtacaggaacctctatcatggctgctgaatttgagggtggtgtagtaattggtgctgattctagaaccaccacaggaacatatattgccaatcgagtaactgataagcttacaaaaataactgatcgtatatattgttgtcgatctggttcagctgctgatacccaagccattgcagatattgtatcttatcatttaggtttccatgggatggaattgggagaagaaccacttgtagaaactagtgctgcagtattccaagaactatgctataattatcgagattctttgatggctggtatacttgtagcaggatgggataagcgaaagggaggtcaaatttactcaattcctattgggggaatgtgtgtgaggcaaaaagtctctattggaggttctggttctggttttgtatacggctatgtagatgctaactataagtctggaatgactaaagaagcttgcgttgatttcgtaattaaaactttggcacttgctatgtcgagagatggctcatcaggtggttgtgttaggattggagttataactaaagatggtatcgaacgtaaagtaattttgggtacagaattacccaaattttatgaagattaatatttcataatatattttgtcttaattcaatacttcattcaataaaattatgaaattttcgaaaaaaa

SEQ ID NO: 724 - DNA, 250 bp, Diabrotica virgifera
tcaacgtcatctcagtttggtttattgttgggtgtaatgtttaaataaaataattattattttgtaaacctgtgccattaaacaaataaagcgatggtgctaattgcagcagcagtctgcacgaaagcaggcaaaacaattgtgtctcgacaatttgttgaaatgaccaaagctagaatagaaggtttgttggctgcctttcctaaattaattcctacaggaacccagcatacatttgtggaaacagatt

SEQ ID NO: 725 - DNA, 251 bp, Diabrotica virgifera
acttcattccagtcttgtgatatttagtgcttacttggtacagcagtttcagtgctgtgctttagaataatttattttttaacatttatatagaaatcaaatactaaccaatcaacatgtgtgaagaagaagttgccgctttagtcgtagacaatggatccggtatgtgcaaagctggttttgctggggatgatgcacctcgtgctgtattcccttcaattgttggacgcccaagacatcagggtgtgatg

SEQ ID NO: 726 - DNA, 249 bp, Diabrotica virgifera
gtaggaatgggacaaaaagattcctatgtaggtgatgaagctcaaagtaaaagaggtatccttaccttaaaataccccatcgagcacggaatagtcacaaactgggatgatatggagaaaatttggcatcatacattctacaatgaactcagagcagccccagaagaacaccctgttctgttgacagaagctcctctcaaccccaaggccaacagggaaaagatgacacaaataatgtttgaaactttc

SEQ ID NO: 727 - DNA, 250 bp, Diabrotica virgifera
acacttacacccttcaaaaactcatttataaactaaaaatgggtgcatctgtaattcctttcatagttttcactgtattatggggaggagttggagctgttctacccatttttgtacctaaaggacccaatagaggaattatccaagttattcttatgataacaggtgtgtcgtgctggttgttctggctgtgttgttacgtagctcaaatgaatcctctgatcggtcctaaactagaacaaaacatcgt

SEQ ID NO: 728 - DNA, 211 bp, Diabrotica virgifera
gataataagttcgattttttacgaaaatgacaagtatcgagactgtggggaccattgtcctgaaattgctgaagttggtgatcaatttgatatgtctcatcttgtaccgaaccggatatcaaggctacttcttgggagtaggaggaacctggaatctaaacgaagaaaaaaatcccgatgcagaaattgtggcttccggcgtattcgtagg

SEQ ID NO: 729 - DNA, 3114 bp, Diabrotica virgifera
ggccagaatggcccggaccggcggccgccctgcagctctagagaaacttcgaaacgcgtggaccgaagcttgcatgcctgcagtgcagcgtgacccggtcgtgcccctctctagagataatgagcattgcatgtctaagttataaaaaattaccacatattttttttgtcacacttgtttgaagtgcagtttatctatctttatacatatatttaaactttactctacgaataatataatctatagtactacaataatatcagtgttttagagaatcatataaatgaacagttagacatggtctaaaggacaattgagtattttgacaacaggactctacagttttatctttttagtgtgcatgtgttctcctttttttttgcaaatagcttcacctatataatacttcatccattttattagtacatccatttagggtttagggttaatggtttttatagactaatttttttagtacatctattttattctattttagcctctaaattaagaaaactaaaactctattttagtttttttatttaataatttagatataaaatagaataaaataaagtgactaaaaattaaacaaataccctttaagaaattaaaaaaactaaggaaacatttttcttgtttcgagtagataatgccagcctgttaaacgccgtcgacgagtctaacggacaccaaccagcgaaccagcagcgtcgcgtcgggccaagcgaagcagacggcacggcatctctgtcgctgcctctggacccctctcgagagttccgctccaccgttggacttgctccgctgtcggcatccagaaattgcgtggcggagcggcagacgtgagccggcacggcaggcggcctcctcctcctctcacggcaccggcagctacgggggattcctttcccaccgctccttcgctttcccttcctcgcccgccgtaataaatagacaccccctccacaccctctttccccaacctcgtgttgttcggagcgcacacacacacaaccagatctcccccaaatccacccgtcggcacctccgcttcaaggtacgccgctcgtcctcccccccccccctctctaccttctctagatcggcgttccggtccatgcatggttagggcccggtagttctacttctgttcatgtttgtgttagatccgtgtttgtgttagatccgtgctgctagcgttcgtacacggatgcgacctgtacgtcagacacgttctgattgctaacttgccagtgtttctctttggggaatcctgggatggctctagccgttccgcagacgggatcgatttcatgattttttttgtttcgttgcatagggtttggtttgcccttttcctttatttcaatatatgccgtgcacttgtttgtcgggtcatcttttcatgcttttttttgtcttggttgtgatgatgtggtctggttgggcggtcgttctagatcggagtagaattctgtttcaaactacctggtggatttattaattttggatctgtatgtgtgtgccatacatattcatagttacgaattgaagatgatggatggaaatatcgatctaggataggtatacatgttgatgcgggttttactgatgcatatacagagatgctttttgttcgcttggttgtgatgatgtggtgtggttgggcggtcgttcattcgttctagatcggagtagaatactgtttcaaactacctggtgtatttattaattttggaactgtatgtgtgtgtcatacatcttcatagttacgagtttaagatggatggaaatatcgatctaggataggtatacatgttgatgtgggttttactgatgcatatacatgatggcatatgcagcatctattcatatgctctaaccttgagtacctatctattataataaacaagtatgttttataattattttgatcttgatatacttggatgatggcatatgcagcagctatatgtggatttttttagccctgccttcatacgctatttatttgcttggtactgtttcttttgtcgatgctcaccctgttgtttggtgttacttctgcaggtcgactttaacttagcctaggatcctaactaactaggataataagttcgattttttacgaaaatgacaagtatcgagactgtggggaccattgtcctgaaattgctgaagttggtgatcaatttgatatgtctcatcttgtaccgaaccggatatcaaggctacttcttgggagtaggaggaacctggaatctaaacgaagaaaaaaatcccgatgcagaaattgtggcttccggcgtattcgtaggtaattgagaattcgatatcaggtccgccttgtttctcctctgtctcttgatctgactaatcttggtttatgatcttgatgatttagcttgactatgcgattgctttcctggacccgtgcagctgcccatcgaccctcaattacctacgaatacgccggaagccacaatttctgcatcgggatttttttcttcgtttagattccaggttcctcctactcccaagaagtagccttgatatccggttcggtacaagatgagacatatcaaattgatcaccaacttcagcaatttcaggacaatggtccccacagtctcgatacttgtcattttcgtaaaaaatcgaacttattatcctagttagttaggttaacctagacttgtccatcttctggattggccaacttaattaatgtatgaaataaaaggatgcacacatagtgacatgctaatcactataatgtgggcatcaaagttgtgtgttatgtgtaattactagttatctgaataaaagagaaagagatcatccatatttcttatcctaaatgaatgtcacgtgtctttataattctttgatgaaccagatgcatttcattaaccaaatccatatacatataaatattaatcatatataattaatatcaattgggttagcaaaacaaatctagtctaggtgtgttttgcgaattatcgatgggccccggccgaagctggccgcgggcatgtggtacctaagggcccataggcgcgcccggtgcatgcaagcttgcttcaagggcccgtttgtacaacttta

SEQ ID NO: 730 - protein, 159 aa, Diabrotica virgifera
MTSIETVGTIVLKLLKLVINLICLILYRTGYQGYFLGVGGTWNLNEEKNPDAEIVASGVFVGFMIYTFVSLISLCFASGDHKTTFTDILMNIVGIFMWIAAGATALHYWLGYLSEYKYTTIDSERQVGLALGAMCIINGAVYLVDGVLSAIFILKAKMQ

SEQ ID NO: 731 - protein, 162 aa, Drosophila melanogaster
MVSVETVGSIFIKALKLIINLVIIFLYRWGDGGEFLGIGGTWNLNEEKSADAEIVASGVMVGFLIYTGCHTIAFAFGTTKHKGELCDTIMNVVGCIMWIAVGGVALHYWKGYMSDEGFLYVNSERQVGIAMGSLCVIEGALYLLDTVLACIHYSKGDTDYTQ
